(19) United States
(12) Patent Application Publication
(10) Pub. No.: US 2024/0000859 A1
(43) Pub. Date: Jan. 4, 2024

(54) DESIGNED BACTERIAL COMPOSITIONS FOR TREATING GRAFT-VERSUS-HOST-DISEASE

(71) Applicant: Seres Therapeutics, Inc., Cambridge, MA (US)

(72) Inventors: Matthew R. HENN, Cambridge, MA (US); Edward J. O'BRIEN, Cambridge, MA (US); Ambar PIÑA, Cambridge, MA (US); Marin VULIC, Cambridge, MA (US); Christopher B. FORD, Cambridge, MA (US); Asuncion MARTINEZ, Cambridge, MA (US); Divya BALASUBRAMANIAN, Cambridge, MA (US); Elizabeth HALVORSEN, Cambridge, MA (US); Karen KIESER, Cambridge, MA (US); Mahmoud SALEH, Cambridge, MA (US); Mary-Jane LOMBARDO, Cambridge, MA (US); Sumon DATTA, Cambridge, MA (US); Madhumitha NANDAKUMAR, Cambridge, MA (US); Priyanka NARENDAR, Cambridge, MA (US); Kankana BARDHAN, Cambridge, MA (US)

(73) Assignee: Seres Therapeutics, Inc., Cambridge, MA (US)

(21) Appl. No.: 18/254,449

(22) PCT Filed: Nov. 24, 2021
(86) PCT No.: PCT/US2021/060878

§ 371 Date: May 25, 2023

Related U.S. Application Data
(60) Provisional application No. 63/118,639, filed on Nov. 25, 2020.

(51) Int. Cl. A61K 35/74; A61P 31/04; A61P 29/00

(52) U.S. Cl. CPC A61K 35/74; A61P 31/04; A61P 29/00

(57) ABSTRACT

Provided herein are bacterial compositions that are useful for treating and preventing complications and side effects associated with a disease or disorder, such as those associated with immune suppression, including infections and/or GvHD, for example, in HSCT subjects. The bacterial compositions disclosed herein are designed to exhibit one or more functional features that are useful for the treatment of such diseases and disorders.

### CROSS-REFERENCE TO RELATED APPLICATIONS

[0001] This application claims the priority benefit of U.S. Provisional Application No. 63/118,639, filed Nov. 25, 2020, which is herein incorporated by reference in its entirety.

### REFERENCE TO SEQUENCE LISTING SUBMITTED ELECTRONICALLY

[0002] The content of the electronically submitted sequence listing in ASCII text file (Name: 4268_020PC02_Seqlisting_ST25.txt; Size: 731,860 bytes; and Date of Creation: Nov. 24, 2021) filed with the application is herein incorporated by reference in its entirety.

### FIELD

[0003] The present disclosure relates to bacterial compositions designed to have certain functional features that are useful for treating and/or preventing a range of diseases and disorders related to immune suppression, such as an infection (including a viral infection or reactivation, invasive infection, blood stream infection), graft-versus-host-disease (GvHD) (for example, in subjects undergoing hematopoietic stem cell transplantation (HSCT) or having an allogeneic or autologous immune response), a cancer, or in subjects undergoing chemotherapy or undergoing or having undergone transplantation.

### BACKGROUND

[0004] Allogeneic hematopoietic stem cell transplantation (HSCT) is an important treatment with curative intent for hematological malignancies, such as leukemia and lymphoma. As the safety of HSCT has improved over recent decades, it has become an important cancer therapy and is performed more than 25,000 times annually worldwide (Gratwohl A., et al., JAMA 2010 Apr. 28; 303 (16):1617-24, Gooley T. A., et al., N Engl J Med. 2010 Nov. 25; 363(22): 2091-2101). The objective of HSCT is to replace diseased cells in the recipient bone marrow with healthy donor stem cells. Recognition and eradication of residual diseased host cells takes place through cellular immunotherapy provided by the transplant (Juric 2016).

[0005] Despite its success, HSCT is not without risks. For instance, chemotherapy is commonly used to condition a patient for transplantation, so that the patient's immune system does not reject the transplantation. However, chemotherapy suppresses the patient's immune system (e.g., decreased circulation of granulocytes and monocytes) and can thereby, increase the patient's susceptibility to infections (Junghanss C., et al., Biol Blood Marrow Transplant 2002; 8(9): 512-20, Blijlevens N. M., et al., Bone Marrow Transplantation 2005; 35: 707-711). Additionally, because of the difficulties in finding a syngenic donor (i.e., genetically identical or sufficiently identical, so that the donor's cells are immunologically compatible with the recipient's immune system), many HSCTs involve allogenic donors. Even with the use of conditioning regimens (e.g., chemotherapy and antibiotics), the donated immune cells can recognize the host cells as foreign and mount an immune response, which can lead to life-threatening inflammation, such as that observed in graft-versus-host disease (GvHD). Accordingly, infection and GvHD account for approximately 40% of deaths in the first 100 days after transplant (D'Souza, A, Fretham C, Lee S J, et al. Current Use of and Trends in Hematopoietic Cell Transplantation in the United States. Biol Blood Marrow Transplant. 2020 May 11:S1083-8791(20)30225-1, D'Souza A., et al. Biol Blood Marrow Transplant 2017 September; 23(9):1417-1421).

[0006] Studies conducted at transplant centers have shown that dysbiosis contributes to both infectious and acute GvHD outcomes with significant reductions in overall survival (OS) and increased mortality (Peled NEJM 2020). The combination of conditioning regimen and antibiotic treatment leads to injury of the GI microbiome (Jenq 2015; Baumgartner 2017; Montassier 2016). A state of dysbiosis develops, characterized by expansion of potentially pathogenic bacteria and loss of species diversity (Peled 2020) in some subjects, a condition of species domination arises in which pathogens constitute over 30% of the organisms observed in stool. These organisms may translocate across an impaired GI tract barrier into the blood stream and cause infections. Bloodstream infections caused by the same organisms that are found in the GI tract are found in 25-50% of HSCT recipients (Taur 2012; Tamburini 2018). Moreover, translocation of pathogens may kindle an inflammatory response, influencing the pathophysiology of acute Graft versus Host Disease (aGvHD) (Peled 2020), a complication that affects the skin, upper and lower GI tract, and the liver.

[0007] Immune suppression, infections, alterations in gut microbe ecology, inflammation, organ damage, risk of death, and other risks associated with GvHD are not limited to subjects who have or are undergoing therapy for GvHD. Immunes suppression and these additional manifestations of diseases and disorders also present risks for subjects who have or are at risk of developing cancer; subjects undergoing chemotherapy; subjects having an allogenic or an autologous immune response; subjects undergoing or having undergone transplantation; subjects infected with bacterial, viral, or other pathogens (including a viral infection or reactivation, invasive infection, blood stream infection); and other circumstances which cause dysbiosis or immune challenges in a subject.

[0008] Accordingly, there remains a need for new and alternative approaches to treating the different diseases and disorders that can occur in HSCT patients, such as infections and GvHD, as well as other diseases and disorders affecting immune suppression, including subjects having cancer, having an allogeneic or an autologous immune response, undergoing chemotherapy, or undergoing or having undergone transplantation.

### BRIEF SUMMARY

[0009] Provided herein are bacterial compositions designed to have certain bacterial species and/or strains and/or functional features that are useful for treating and/or preventing a range of diseases and disorders related to immune suppression and associated with, for example, infection, GvHD, an allogeneic or an autologous immune response, chemotherapy, transplantation, as well as related conditions. Also provided are methods of treating diseases and disorders as described herein.

[0010] In aspects provided herein the compositions comprise a purified population of bacteria, wherein the purified population of bacteria comprises one or more bacteria having a 16S rDNA sequence that is at least 85%, at least 90%, at least 95%, at least 96%, at least 97%, at least 98%, at least 99%, or 100% identical to a 16S rDNA sequence set forth in SEQ ID NOs: 1-352. In some aspects, the compositions comprise a purified population of bacteria, wherein the purified population of bacteria comprises Eubacterium maltosivorans, Clostridium aldenense, Clostridium bolteae, Clostridium glycyrrhizinilyticum, Clostridium hylemonae, Clostridium innocuum, Clostridium lavalense, Clostridium scindens, Clostridium spiroforme, Clostridium symbiosum, Eubacterium rectale, Ruminococcus gnavus, Ruminococcus torques, Absiella dolichum, Agathobaculum desmolans, Akkermansia muciniphila, Alistipes finegoldii, Alistipes shahii, Anaerofustis stercorihominis, Anaeromassilibacillus senegalensis, Anaerostipes caccae, Anaerotruncus colihominis, Bacteroides caccae, Faecalibacterium prausnitzii, Faecalicatena contorta, Faecalicatena orotica, Flavonifractor plautii, Gemmiger formicilis, Harryflintia acetispora, Holdemania filiformis, Holdemania massiliensis, Intestinimonas butyriciproducens, Lachnospira pectinoschiza, Lachnospiraceae bacterium 5 1 57FAA, Lactobacillus fermentum, Lactonifactor longoviformis, Longibaculum muris, Longicatena caecimuris, Murimonas intestina, Oscillibacter ruminantium, Bacteroides eggerthii, Bacteroides faecis, Bacteroides intestinalis, Bacteroides koreensis, Bacteroides kribbi, Bacteroides salyersiae, Bacteroides uniformis, Bacteroides vulgatus, Bacteroides xylanisolvens, Barnesiella intestinihominis, Bifidobacterium dentium, Bifidobacterium longum, Bifidobacterium stercoris, Blautia coccoides, Blautia hominis, Blautia hydrogenotrophica, Blautia luti, Blautia obeum, Blautia producta, Blautia wexlerae, Butyricimonas faecihominis, Cellulosilyticum lentocellum, Clostridium butyricum, Ruthenibacterium lactatiformans, Sellimonas intestinalis, Shigella flexneri, Terrisporobacter mayombei, Terrisporobacter petrolearius, Turicibacter sanguinis, Tyzzerella nexilis, Clostridium disporicum, Clostridium subterminale, Clostridium tertium, Collinsella aerofaciens, Coprococcus comes, Coprococcus eutactus, Dorea longicatena, Drancourtella massiliensis, Eggerthella lenta, Eisenbergiella tayi, Emergencia timonensis, Erysipelatoclostridium ramosum, Eubacterium callanderi, Paeniclostridium sordellii, Parabacteroides distasonis, Parabacteroides merdae, Paraclostridium bifermentans, Peptostreptococcus stomatis, Robinsoniella peoriensis, Romboutsia timonensis, Roseburia intestinalis, Roseburia inulinivorans, Ruminococcus albus, Ruminococcus bromii, Ruminococcus faecis, Ruminococcus lactaris, or combinations thereof. In some aspects, the compositions comprise a purified population of bacteria, wherein the purified population of bacteria comprises a species selected from FIG. 1 or combinations thereof. In some aspects, the compositions comprise a purified population of bacteria, wherein the purified population of bacteria comprises species of DE122435.3 (DE10 in FIG. 1), DE122435.1 (DE8 in FIG. 1), or DE122435.4 (DE11 in FIG. 1) or bacteria having a 16S rDNA sequence that is at least 97%, at least 98%, at least 99%, or 100% identical to a 16S rDNA sequence of bacteria in the recited designed compositions. In some aspects, the compositions comprise a purified population of bacteria, wherein the purified population of bacteria comprises species of DE486373.1 (DE23 in FIG. 1) or bacteria having a 16S rDNA sequence that is at least 97%, at least 98%, at least 99%, or 100% identical to a 16S rDNA sequence of bacteria in the recited designed composition.

[0011] In aspects described herein, the bacterial compositions described herein are used in methods of treating and/or reducing the risk of an infection in a subject in need thereof, comprising administering to the subject an effective amount of such bacterial compositions or pharmaceutical formulations thereof, wherein the infection includes a blood stream infection, sepsis, tissue infection, invasive infection, a gastrointestinal infection, a viral infection or reactivation, or a combination thereof. In some aspects, the bacterial compositions described herein are used in methods of treating and/or reducing the risk of graft-versus-host-disease (GvHD) in a subject in need thereof, comprising administering to the subject an effective amount of such bacterial compositions or pharmaceutical formulations thereof. In some aspects, the bacterial compositions described herein are used in methods of treating and/or reducing the risk of mucositis in a subject in need thereof, comprising administering to the subject an effective amount of such bacterial compositions or pharmaceutical formulations thereof.

[0012] In aspects described herein, the bacterial compositions described herein are used in methods of treating a disease or disorder associated with an allogeneic or an autologous immune response in a subject in need thereof, comprising administering to the subject an effective amount of such bacterial compositions or pharmaceutical formulations thereof. In some aspects, the bacterial compositions described herein are used in methods of treating, reducing, or alleviating a symptom associated with chemotherapy in a subject in need thereof, comprising administering to the subject an effective amount of such bacterial compositions or pharmaceutical formulations thereof. In some aspects, the bacterial compositions described herein are used in methods of preventing, reducing, or treating rejection in a subject undergoing transplantation (e.g., either HSCT or organ), comprising administering to the subject an effective amount of such bacterial compositions or pharmaceutical formulations thereof.

[0013] In aspects described herein, the bacterial compositions described herein are used in methods of modulating a biological activity in a subject in need thereof, comprising administering to the subject an effective amount of such bacterial compositions or pharmaceutical formulations thereof, where such biological activity includes short-chain fatty acid production, medium-chain fatty acid production, tryptophan metabolite production, fucosidase activity, Wnt activation, anti-IL-8 activity, or combinations thereof. In some aspects, the bacterial compositions described herein are used in methods of decreasing the number and/or relative abundance of antibiotic resistant bacteria in a gastrointestinal tract of a subject in need thereof, comprising administering to the subject an effective amount of such bacterial compositions or pharmaceutical formulations thereof. In some aspects, the bacterial compositions described herein are used in methods of improving epithelial barrier status, reducing inflammation, and/or reducing mucositis in a gastrointestinal tract of a subject in need thereof, comprising administering to the subject an effective amount of such bacterial compositions or pharmaceutical formulations thereof.

[0014] In aspects described herein, the bacterial compositions described herein are used in methods of decreasing mortality due to an invasive infection in a subject in need thereof, comprising administering to the subject an effective amount of such bacterial compositions or pharmaceutical formulations thereof, where the subject is undergoing or has undergone transplantation. In some aspects, the bacterial compositions described herein are used in methods of reducing transplantation-related complications in a subject in need thereof, comprising administering to the subject an effective amount of such bacterial compositions or pharmaceutical formulations thereof, where the subject is undergoing or has undergone transplantation. In some aspects, the bacterial compositions described herein are used in methods of increasing the overall survival and/or progression-free survival of a subject in need thereof, comprising administering to the subject an effective amount of such bacterial compositions or pharmaceutical formulations thereof, where the subject is undergoing or has undergone transplantation.

[0015] In aspects described herein, the subjects treated or administered the bacterial compositions or pharmaceutical formulations thereof according to the methods described herein have undergone or are undergoing transplantation. In some aspects, the transplantation is an allogeneic hematopoietic stem cell transplantation (allo-HSCT) or an allogeneic organ transplantation. In some aspects, the transplantation is an autologous hematopoietic stem cell transplantation (allo-HSCT) or an autologous organ transplantation. In some aspects, subjects that have undergone or are undergoing transplantation and administered the bacterial compositions or pharmaceutical formulations thereof have i) an increased prevalence in their stool of one or more strains in the bacterial composition, ii) a decreased abundance in their stool of Enterococcus spp., Enterobacteriaceae spp., or both, iii) a decreased incidence of bloodstream infections including but not limited to bacterial infections (VRE, CRE, or ESBL), fungal infections, or combinations thereof, iv) a decreased incidence of gastrointestinal infections including but not limited to Clostridiodes difficile, viral infections (including but not limited to norovirus, adenovirus, or rotavirus), parasitic infections (including but not limited to Cryptosporidia), or combinations thereof, v) a decreased incidence of acute GvHD including but not limited to acute GvHD Grades II, III, and IV, vi) a decreased incidence of febrile neutropenia, vii) reduced frequency, length, or both frequency and length of hospitalization stay, or vii) any combination thereof, relative to a reference (e.g., a corresponding reference in a subject that did not receive the composition disclosed herein or corresponding reference in the subject prior to the administration of the composition).

[0016] In aspects described herein, the subjects treated or administered the bacterial compositions or pharmaceutical formulations thereof according to the methods described herein suffers from a cancer. In some aspects, the cancer comprises acute myeloid leukemia (AML), acute lymphoblastic leukemia (ALL), myelodysplastic syndromes (MDS), myeloproliferative neoplasms (MPN), or combinations thereof.

### BRIEF DESCRIPTION OF THE DRAWINGS/FIGURES

[0017] FIG. 1 shows the DEs tested in the VRE and/or CRE decolonization animal models and their strain makeup. The VRE and CRE log reduction values are averaged across all time points and repeated runs.

[0018] FIGS. 2A, 2B, and 2C show the diversity of the DEs tested in the VRE and/or CRE decolonization animal models. FIG. 2A shows the STR strain makeups in the DEs tested. FIG. 2B shows the histogram of the numbers of strains in the DEs tested. It shows most DEs tested have 13, 14, 15, 16, or 17 strains. FIG. 2C shows the histogram of the frequencies of strains being included in the DE tested.

[0019] FIGS. 3A, 3B, 3C, 3D, 3E, 3F, and 3G summarize log titer reduction of DEs tested in the VRE or CRE decolonization animal models. FIGS. 3A and 3B show the histogram of average VRE or CRE log titer reduction across all time points in the animal models of the DEs tested. FIG. 3C shows that the average log reduction in the VRE titer in the DE treated animals at days 7, 9, 11, 13, 15, 18, and 21 post VRE challenge. FIG. 3D shows that the average log reduction in the CRE titer in the DE treated animals at days 7, 9, 11, 13, 15, 18, and 21 post CRE challenge. FIGS. 3E and 3F demonstrate that the correlations between the number of strains in the DEs and the average log reduction across all time points. The Spearman's correlation coefficient r=0.028, p-value=0.84 and r=−0.025, p-value=0.90 indicate that the number of strains in a DE is not correlated with VRE and CRE decolonization, respectively. FIG. 3G demonstrates the correlation between VRE and CRE titer reduction by a DE. The Spearman's correlation coefficient r=0.14 and p-value=0.49 indicate that the VRE and CRE titer reduction by a DE is not correlated, i.e., VRE and CRE decolonization in the animal models are driven by distinct factors. The log reduction in the titer was determined from the difference between the median of the vehicle only group and DE treatment group at a given time-point.

[0020] FIGS. 4A, 4B, 4C, 4D, 4E, and 4F show the effect of strains and strain combinations from the DEs tested on VRE or CRE decolonization estimated by the single strain additive model, which estimates the additive effect of each strain on VRE/CRE decolonization, after accounting for the additive effects of other strains. Each circle indicates a strain. Strains that are perfectly collinear are combined into one circle and these combined strains are connected by “_” in the strain list in FIGS. 4E and 4F. FIG. 4A shows a volcano plot illustrating the estimated strain effect on log VRE titer reduction and the significance of the effect. The dotted line indicates p value of 0.05. The estimated effects of the strains above the dotted line are significant at a p value lower than 0.05. FIG. 4B shows the estimated effect on log VRE titer reduction of each strain. The vertical line indicates 90% confidence interval and the open circle indicates strain or strain combinations with significant estimated effect. FIG. 4C shows a volcano plot illustrating the estimated strain effect on log CRE titer reduction and the significance of the effect. The dotted line indicates p value of 0.05. The estimated effects of the strains above the dotted line are significant at a p value lower than 0.05. FIG. 4D shows the estimated effect on log CRE titer reduction of each strain. The vertical line indicates 90% confidence interval and the open circle indicates strain or strain combinations with significant estimated effect. FIG. 4E records all the results for each strain from VRE single strain additive model including t-statistic, p-value, linear coefficient, confidence interval for linear coefficient. FIG. 4F records all the results for each strain from CRE single strain additive model including t-statistic, p-value, linear coefficient, confidence interval for linear coefficient. A negative value in estimated strain effect on log VRE or CRE suggests that the strain reduces VRE or CRE colonization while a positive value suggests that the strain increases VRE or CRE colonization.

[0021] FIGS. 5A, 5B, 5C, and 5D illustrate the analysis results from the strain interaction model, which estimate pairwise (synergistic and antagonistic) interactions between strains on VRE/CRE decolonization, accounting for differences from the expected effects based on single strain additive effects. Each circle indicates a pair of strains. Strain interactions that are perfectly collinear are combined into one circle and these combined strains are connected by “_or_” in the strain list in FIGS. 5C and 5D. FIG. 5A shows the estimated pair interaction effect on log VRE titer reduction of each strain pair. Only strains with estimated effects at p<0.1 from the single strain additive model were included (n=28 for VRE). All pairwise interactions between these strains included in FIG. 5C. The vertical line indicate 90% confidence interval and the open circle indicates strain combinations with significant estimated effect. FIG. 5B shows the estimated pair interaction effect on log CRE titer reduction of each strain pair. Only strains with estimated effects at p<0.1 from the single strain additive model were included (n=6 for CRE). All pairwise interactions between these strains included in FIG. 5D. The vertical line indicate 90% confidence interval and the open circle indicates strain combinations with significant estimated effect. FIG. 5C records all the results for each strain interaction from VRE strain interaction model including t-statistic, p-value, linear coefficient, confidence interval for linear coefficient. FIG. 5D records all the results for each strain from CRE strain interaction model including t-statistic, p-value, linear coefficient, confidence interval for linear coefficient. A negative value in estimated pair interaction effect on log VRE or CRE suggests that the strain pair synergistically reduces VRE or CRE colonization while a positive value suggests that the strain pair antagonistically affect VRE or CRE colonization.

[0022] FIGS. 6A, 6B, and 6C show the ability of the DE122435.3 composition to reduce VRE colonization in vivo. FIG. 6A provides a schematic of the experimental design. FIG. 6B provides a comparison of VRE titer in animals treated with a vehicle control (square) or the DE122435.3 composition (circle) over a course of 21 days post VRE challenge. The median VRE CFU per gram of feces was calculated for each group and plotted (n=6 per group). “L.O.D.” refers to the limit of detection. Data were analyzed using the Mann-Whitney t-test and significance was determined as a p-value of p<0.05=*; p<0.01=**. FIG. 6C provides a table showing the log reduction in VRE titer in the DE122435.3 treated animals compared to animals treated with the vehicle control at days 11, 13, 15, 18, and 21 post VRE challenge. The log reduction in VRE titer was determined from the difference between the median of the vehicle only group and DE122435.3 treatment group at a given time-point.

[0023] FIGS. 7A, 7B, and 7C show the ability of the DE122435.3 composition to reduce CRE colonization in vivo. FIG. 7A provides a schematic of the experimental design. FIG. 7B provides a comparison of CRE titer in animals treated with a vehicle control (square) or the DE122435.3 composition (circle) over a course of 21 days post CRE challenge. The median CRE CFU per gram of feces was calculated for each group and plotted (n=10 per group). “L.O.D.” refers to the limit of detection. Data were analyzed using the Mann-Whitney t-test and significance was determined as a p-value of p<0.05=*; p<0.01=**; p<0.001=***; and p<0.0001=****. FIG. 7C provides a table showing the log reduction in CRE titer in the DE122435.3 treated animals compared to animals treated with the vehicle control at days 11, 13, 15, 18, and 21 post CRE challenge. The log reduction in CRE titer was determined from the difference between the median of the vehicle only group and DE122435.3 treatment group at a given time-point.

[0024] FIG. 8A provides a schematic diagram of the epithelial barrier integrity assay described in Example 4. FIG. 8B provides a comparison of the ability of DE122435.3, SER-287 (Pilot Lot 20, 21, 22), and negative control DE821956.1 to promote barrier integrity in the presence of IFN-γ stimulation. The ‘Reps’ indicate the HDACi values of the four independent experiments for each bacterial composition. Dots represent biological replicates per experiment. Mean and standard deviations are shown for each test article.

[0025] FIG. 9A provides a comparison of the ability of supernatants from (i) DE122435.3, (ii) DE122435.1, (iii) DE122435.4, (iv) DE673670.1, (v) pilot lot 20, and (vi) negative control DE821956.1 composition cultures to inhibit IL-8 secretion by HT29 epithelial cells (IECs) after stimulation with TNF-α. FIG. 9B provides a comparison of the pro-inflammatory nature of the following bacterial compositions: (i) DE122435.3, (ii) DE122435.1, (iii) DE122435.4, (iv) DE673670.1, (v) pilot lot 20, and (vi) negative control DE821956.1. In particular, the pro-inflammatory nature of the compositions is assessed by measuring the ability of the supernatant from the different bacterial composition cultures to induce IL-8 secretion in IECs in the absence of TNF-α stimulation. In both FIGS. 9A and 9B, IECs that were either not stimulated with TNF-α or TNF-α alone were used as controls (negative and positive controls, respectively).

[0026] FIG. 10 provides a comparison of the ability of different bacterial compositions to inhibit HDAC activity in vitro. The bacterial compositions shown are as follows: (i) DE122435.1, (ii) DE122435.3, (iii) DE122435.4, (iv) DE673670.1, (v) pilot lot 20 (spore-prep composition), and (vi) negative control DE821956.1. HDAC inhibition activity was quantified in vitro using a chemiluminescent assay. Results are expressed as the % HDAC inhibition relative to uninoculated growth media. The ‘Reps’ indicate the HDACi values of the four independent experiments for each bacterial composition. Dots represent biological replicates per experiment (8-12 replicates). Mean and standard deviations are shown for each test article. For each bacterial composition,

[0027] FIGS. 11A, 11B, 11C, 11D, and 11E provide a comparison of various functional attributes of five different DEs (i.e., DE122435.1, DE122435.4, DE122435.3, and DE673670.1) and three spore preps disclosed herein as measured in vitro: (i) pilot lot 20, (ii) pilot lot 21, (iii) pilot plot 22, and negative control DE821956.1. The following functional attributes are shown: (i) ability to produce butyrate (FIG. 11A); (ii) ability to produce propionate (FIG. 11B); (iii) ability to produce acetate (FIG. 11C); (iv) ability to produce valerate (FIG. 11D); (v) ability to produce indole (FIG. 11E).

[0028] FIG. 12 provides a comparison of the bile acid metabolic activity of the following bacterial compositions: (i) DE122435.3, (ii) DE821956.1, and pilot natural product (PNP) 167020 (i.e., spore-prep composition). The bile acid metabolic activity is shown as with the 7aD derivatives plotted (FIG. 12).

[0029] FIG. 13 provides a schematic diagram of the method used to measure the ability of the bacterial compositions disclosed herein to modulate certain gene expression in primary human colonic organoids. Further description can be found in Example 7.

[0030] FIGS. 14A, 14B, 14C, 14D, 14E, 14F, 14G, 14H, 14I, 14J, 14K, 14L, 14M, 14N, 14O, and 14P provide a comparison of the ability of different bacterial compositions to prevent IFN-γ-mediated induction of selected gene expression pathways as measured in the primary human colonic organoid assay described in FIG. 13. The bacterial compositions tested include: (i) DE821956.1, an inflammatory bacterial composition, (ii) Pilot lot 20 (i.e., spore-prep composition), (iii) Pilot lot 21 (i.e., spore-prep composition), and (iv) DE122435.3. Medium alone and IFN-γ alone were used as controls. After treatment, colonic organoid lysates were evaluated for gene expression pathways using the Human Autoimmune Panel (NanoString Technologies). Pathway scores represent the high level expression change for all the genes in the panel assigned to a particular pathway. Pathway scores are Z-transform for ease of representation. The score for the following pathways are shown: (1) NF-κB signaling (FIG. 14A), (2) TNF family signaling (FIG. 14B), (3) inflammasomes (FIG. 14C), (4) oxidative stress (FIG. 14D), (5) apoptosis (FIG. 14E), (6) Th2 differentiation (FIG. 14F), (7) Th17 mediated biology (FIG. 14G), (8) complement system (FIG. 14H), (9) type I interferon signaling (FIG. 14I), (10) type II interferon signaling (FIG. 14J), (11) lymphocyte trafficking (FIG. 14K), (12) Toll Like Receptor signaling (FIG. 14L), (13) NLR signaling (FIG. 14M), (14) mTOR (FIG. 14N), (15) MHC Class I antigen presentation (FIG. 14O), and (16) MHC Class II antigen presentation (FIG. 14P).

[0031] FIG. 15 provides an analysis of the effects of treatment with IFN-γ relative to media treatment, or DE122435.3 and IFN-γ relative to treatment with IFN-γ alone, on gene expression for individual chemokines, cytokines, and cytokine receptors of relevance for GvHD regulated by the bacterial compositions disclosed. Genes are indicated as decreasing, not changing, or increasing in expression in either IFN-γ treatment relative to media only, or treatment with DE122435.3 and IFN-γ relative to IFN-γ treatment only.

[0032] FIGS. 16A and 16B provide a barplot comparison at the individual gene level of the ability of different bacterial compositions to downmodulate the transcription of various chemokines, cytokines, and interleukins in primary human colonic organoids. The bacterial compositions tested include the following: (i) DE122435.3, (ii) Pilot lot 20 (i.e., spore-prep composition), (iii) Pilot lot 21 (i.e., spore-prep composition), and (iv) DE821956.1. The colonic organoids treated with one of the above bacterial compositions were all stimulated with IFN-γ to induce the inflammatory gene expression. Colonic organoids treated with media alone and IFN-γ alone were used as controls. After treatment, colonic organoid lysates were evaluated for gene expression pathways using the Human Autoimmune Panel (NanoString Technologies). Individual gene counts are normalized using a set of house keeping genes using NSolver software Advanced analysis. FIG. 16A shows the normalized gene expression of various chemokines and cytokines. FIG. 16B shows the normalized gene expression of various interleukins.

[0033] FIG. 17 provides a barplot comparison of the ability of different bacterial compositions to induce the transcription in primary human colonic organoids treated with (right side) or without (left side) IFN-γ. The bacterial compositions tested include the following: (i) DE122435.3, (ii) Pilot lot 20 (i.e., spore-prep composition), (iii) Pilot lot 21 (i.e., spore-prep composition), and (iv) DE821956.1. As above, colonic organoids treated with one of the above bacterial compositions were all stimulated with IFN-γ to induce the inflammatory gene expression. Colonic organoids treated with media alone and IFN-γ alone were used as controls. After treatment, colonic organoid lysates were evaluated for gene expression pathways using the Human Autoimmune Panel (NanoString String). Individual gene counts are normalized using a set of house keeping genes using NSolver software Advanced analysis.

[0034] FIGS. 18A and 18B show the effect of different bacterial compositions on the viability and anti-inflammatory phenotype (skew towards anti-inflammatory IL-10 production compared to pro-inflammatory IL-6 production) of macrophages differentiated from human monocytic THP-1 cells after PMA stimulation. The bacterial compositions tested include: (i) DE122435.3, (ii) DE821956.1 and (iii) three complex bacterial communities derived from healthy humans (pilot natural products, PNP). Bacterial treatments consist of 1% bacterial culture supernatant, 1% supernatant plus multiplicity of infection (MOI) 20 bacterial cells, or MOI20 bacterial cells alone. Macrophages alone (i.e., not treated with a supernatant of a bacterial composition) and macrophages treated with bacterial broth (the FCM4 growth medium) were used as controls.

[0035] FIGS. 19A, 19B, 19C, 19D, 19E, 19F, 19G, 19H, and 19I show the effect of 1% bacterial culture supernatant derived from different bacterial compositions on the transcriptional profile of macrophages treated with different bacterial compositions. The bacterial compositions tested include: (i) DE122435.3, (ii) DE821956.1 and (iii) three complex bacterial communities derived from healthy humans (pilot natural products [PNP], PNP167020, PNP167021, PNP167022). Macrophages alone (i.e., not treated with a supernatant of a bacterial composition) and macrophages treated with bacterial broth were used as controls. Scores for Th1 activation (FIG. 19A), Th2 activation (FIG. 19B), lymphocyte activation (FIG. 19C), cell cycle and apoptosis (FIG. 19D), antigen presentation (FIG. 19E), TLR signaling (FIG. 19F), chemokine signaling (FIG. 19G), cytokine signaling (FIG. 19H), and interferon signaling (FIG. 19I) are derived from individual gene expression values within the respective pathways and are derived from a principal component analysis of these gene expression values across samples (scores are computed in the nSolver software).

[0036] FIG. 19J provides a dotplot comparison of cytokine production (e.g. IFNγ, IL-13, IL-4, IL-23, IL-6, IL-17, TNFα, IL-1β, CCL2, and CXCL10) in macrophages treated with 1% bacterial supernatant of bacterial compositions (i) DE122435.3, (ii) DE821956.1 and (iii) PNP167020, PNP167021, PNP167022). Dotplots represent the mean±SD with statistical significance analyzed via one-way ANOVA with Tukey's multiple comparisons correction. Significance was determined as a p-value of p<0.05=*, p<0.01=**, p<0.001=***, p<0.0001=****.

[0037] FIGS. 20A and 20B show the effect of 1% supernatant of different bacterial compositions on transcriptional upregulation of two innate immune defense pathways in human macrophages. The bacterial compositions tested include: (i) DE122435.3, and (ii) PNP167020, (iii) PNP167021, and (iv) PNP167022. Macrophages alone (i.e., not treated with a supernatant of a bacterial composition) and macrophages treated with bacterial broth (the FCM4 growth medium) were used as controls. FIG. 20A provides a comparison of the upregulation of the C3 gene in the complement pathway from the different treatment groups. FIG. 20B provides a comparison of the expression of the S100A8 and S100A9 genes, which form an antimicrobial chelation complex upon protein synthesis, for the different groups.

[0038] FIGS. 21A, 21B, 21C, and 21D provide comparison of CD4+ T cell immune response in germ-free mice (“GF”) colonized with either DE821956.1, DE122435.1, DE122453.3, DE916091.1, or a positive control composition for four weeks. Germ-free mice that did not receive any bacterial composition (“GF”) were used as a negative control. Lymphocytes were isolated from the colonic lamina propria and the frequency of regulatory and effector CD4+ T cell populations were measured by flow cytometry. FIG. 21A shows the frequency of Foxp3+RORγT+ CD4+ Treg cells. FIG. 21B shows the ratio of the frequency of percent FoxP3+RORγT+ CD4+ T cells to percent IFNγ+ CD4+ T cells. FIG. 21C shows the ratio of the frequency of percent FoxP3+RORγT+ CD4+ T cells to percent IL-17A+RORγT+CD4+ T cells. Bar graphs represent the mean±SEM and points represent individual mice. Data were analyzed using one-way ANOVA with a post-hoc Fisher's LSD test. Significance was determined as a p-value of p<0.05=*, p<0.01=**, p<0.001=***, p<0.0001=****. FIG. 21D shows the treatment design.

[0039] FIGS. 22A, 22B, and 22C show the efficacy of the combination of DE122435.3 and the combo ICI antibodies (i.e., anti-PD-L1 and anti-CTLA-4) in treating CT26 tumor in an animal model. FIG. 22A shows the treatment schedule. Germ-free mice were treated with the DE122435.3 composition or negative control DE821956.1. Some of the animals additionally received the combo ICI antibodies, while the control animals received an isotype control antibody. FIG. 22B shows a comparison of tumor volume in the animals from the different treatment groups at day 10 post tumor inoculation (i.e., when the antibody administration started). FIG. 22C shows a comparison of tumor volume in the animals from the different treatment groups at day 21 post tumor inoculation (i.e., when the animals received their final antibody administration). In both FIGS. 22B and 22C, the treatment groups shown include: (i) negative control DE821956.1+ isotype control antibody (first bar); (ii) negative control DE821956.1+ combo ICI antibodies (second bar); (iii) DE122435.3+ isotype control antibody (third bar); and (iv) DE122435.3+ combo ICI antibodies (fourth bar).

[0040] FIGS. 23A, 23B, and 23C show the tumor growth dynamics in the CT26 tumor animals treated with one of the following: (i) negative control DE821956.1+ isotype control antibody (first bar); (ii) negative control DE821956.1+ combo ICI antibodies (i.e., anti-PD-L1 and anti-CTLA-4) (second bar); (iii) DE122435.3+ isotype control antibody (third bar); and (iv) DE122435.3+ combo ICI antibodies (fourth bar). FIG. 23A shows tumor growth over a period of 21 days post tumor inoculation in animals from all the treatment groups. FIG. 23B shows a comparison of tumor growth in the animals treated with the negative control DE821956.1 in combination with either the combo ICI antibodies or the isotype control. FIG. 23C shows a comparison of tumor growth in the animals treated with the DE122435.3 in combination with either the combo ICI antibodies or the isotype control.

[0041] FIGS. 24A and 24B show the percentages of total CD45⁺ T cells and CD8⁺ T cells, respectively, in the tumor tissues of animals treated with one of the following: (i) negative control DE821956.1+ isotype control antibody (first bar); (ii) negative control DE821956.1+ combo ICI antibodies (i.e., anti-PD-L1 and anti-CTLA-4) (second bar); (iii) DE122435.3+ isotype control antibody (third bar); and (iv) DE122435.3+ combo ICI antibodies (fourth bar). In FIG. 24A, the population of CD45⁺ T cells are shown as a percentage of total viable cells. In FIG. 24B, the population of CD8⁺ T cells are shown as a percentage of total CD45+ T cells.

[0042] FIGS. 25A, 25B, and 25C show the percentage of effector CD8⁺ T cells in the tumor tissues of animals treated with one of the following: (i) negative control DE821956.1+ isotype control antibody (first bar); (ii) negative control DE821956.1+ combo ICI antibodies (i.e., anti-PD-L1 and anti-CTLA-4) (second bar); (iii) DE122435.3+ isotype control antibody (third bar); and (iv) DE122435.3+ combo ICI antibodies (fourth bar). FIG. 25A shows the percentage of CD8+ T cells that are CD25+CD69+ in the tumor tissues. FIG. 25B shows the percentage of CD8+ T cells in the tumor tissues that express intermediate PD-1 expression. FIG. 25C shows the frequency of CD8+ T cells that express GranzymeB (CD103+) in the tumor tissues.

[0043] FIGS. 26A, 26B, and 26C show the percentage of migratory CD8+ T cells in the tumor tissues of animals treated with one of the following: (i) negative control DE821956.1+isotype control antibody (first bar); (ii) negative control DE821956.1+ combo ICI antibodies (i.e., anti-PD-L1 and anti-CTLA-4) (second bar); (iii) DE122435.3+isotype control antibody (third bar); and (iv) DE122435.3+combo ICI antibodies (fourth bar). FIG. 26A shows the percentage of CD8+ T cells that are CD103+ in the tumor tissues. FIG. 26B shows the percentage of CD8+ T cells that are CD103+Granzyme B+ in the tumor tissues. FIG. 26C shows the percentage of CD8+ T cells that are CD103+CD25+CD69+ in the tumor tissues.

[0044] FIGS. 27A, 27B, 27C, and 27D show the percentage of exhausted CD8+ T cells in the tumor tissues of animals treated with one of the following: (i) negative control DE821956.1+isotype control antibody (first bar); (ii) negative control DE821956.1+ combo ICI antibodies (i.e., anti-PD-L1 and anti-CTLA-4) (second bar); (iii) DE122435.3+ isotype control antibody (third bar); and (iv) DE122435.3+ combo ICI antibodies (fourth bar). FIG. 27A shows the percentage of CD8+ T cells that are PD-1+ in the tumor tissues. FIG. 27B shows the percentage of CD8+ T cells that are TIM3+LAG3+PD-1+ high in the tumor tissues. FIG. 27C shows the percentage of CD8+ T cells with intermediate PD-1+ expression as a percentage of total CD8+ T cells in the tumor tissues. FIG. 27D shows the percentage of CD8+ T cells with high PD-1+ expression as a percentage of total CD8+ T cells in the tumor tissues.

[0045] FIGS. 28A, 28B, 28C, 28D, and 28E show the percentage of the dendritic cells or macrophage populations in the tumor tissues of animals treated with one of the following: (i) negative control DE821956.1+ isotype control antibody (first bar); (ii) negative control DE821956.1+ combo ICI antibodies (i.e., anti-PD-L1 and anti-CTLA-4) (second bar); (iii) DE122435.3+ isotype control antibody (third bar); and (iv) DE122435.3+ combo ICI antibodies (fourth bar). FIG. 28A shows the frequency of CD11c+CD11b-mature dendritic cells as a percentage of total CD45+ cells in the tumor tissues. FIG. 28B shows the frequency of CD11b+ immature dendritic cells as a percentage of total CD45+ cells in the tumor tissues. FIG. 28C shows the percentage of CD11b-CD11c+ mature dendritic cells that are CD103+ in the tumor tissues. FIG. 28D shows the percentage of CD11b+ immature dendritic cells that are CD103+ in the tumor tissues. FIG. 28E shows the frequency of CD11b+F4/80+ macrophage cells as a percentage of total CD45+ cells in the tumor tissues.

[0046] FIGS. 29A, 29B, 29C, 29D, 29E, and 29F show the percentages of different T cell populations in the tumor-draining lymph nodes (“TDLNs”) of animals treated with one of the following: (i) negative control DE821956.1+ isotype control antibody (first bar); (ii) negative control DE821956.1+ combo ICI antibodies (i.e., anti-PD-L1 and anti-CTLA-4) (second bar); (iii) DE122435.3+ isotype control antibody (third bar); and (iv) DE122435.3+ combo ICI antibodies (fourth bar). FIG. 29A shows the percentage of CD45+ T cells of total viable cells in the TDLNs. FIG. 29B shows the frequency of CD8+ T cells as a percentage of total CD45+ T cells in the TDLNs. FIG. 29C shows the percentage of CD8+ T cells that are IFNγ+ in the TDLNs. FIG. 29D shows the percentage of CD8+ T cells that are CD69+ in the TDLNs. FIG. 29E shows the percentage of CD69+CD8+ T cells that are CD103+ in the TDLNs. FIG. 29F shows the percentage of CD8+ T cells that are PD-1+ in the TDLNs.

[0047] FIGS. 30A and 30B show the percentages of different dendritic cell populations in the tumor-draining lymph nodes (“TDLNs”) of animals treated with one of the following: (i) negative control DE821956.1+ isotype control antibody (first bar); (ii) negative control DE821956.1+ combo ICI antibodies (i.e., anti-PD-L1 and anti-CTLA-4) (second bar); (iii) DE122435.3+ isotype control antibody (third bar); and (iv) DE122435.3+ combo ICI antibodies (fourth bar). FIG. 30A shows the frequency of CD11c+ dendritic cells as a percentage of total CD45+ cells in the TDLNs. FIG. 30B shows the percentage of CD11+ dendritic cells that are MHCI+ in the TDLNs.

[0048] FIGS. 31A, 31B, 31C, 31D, 31E, 31F, 31G, 31H, and 31I show the effects of DE122435.3 composition on human T cells in an in vitro assay. The assays use CD3/CD28 activation that does not require feeder cells (antigen-presenting cells) or antigen. The primary human T cells were treated with bacterial supernatants from compositions including DE122435.3, and DE821956.1, DE916091.1, PNP 16720. PNP 16721, PNP 16722 or the negative control bacterial media. FIGS. 31A, 31B, and 31C show the expression of CD45RA (a gene downregulated with T cell activation), CD45RO and CD69 (two activation markers) in CD8 T cells treated with DE122435.3 compared to other treatment groups. FIGS. 31D, 31E, and 31F show the comparison of all treatment groups in normalized gene counts of the expression of IL-24, TNF, and perforin, respectively. FIGS. 31G, 31H, and 31I show the quantification of IFNγ gene expression by multiplexed molecular barcode (e.g., available from NanoString Technologies), IFNγ secreted protein by multiplexed bead-based (e.g., available from Luminex), and intracellular IFNγ protein by flow cytometry, respectively.

[0049] FIGS. 32A, 32B, 32C, 32D, and 32E show the effects of DE122435.3 composition on human T cells in an in vitro assay. FIGS. 32A, 32B, 32C, 32D and 32E show the normalized gene counts for T cell inhibitory receptors TIGIT, TIM-3, LAG-3, PD-1 and CTLA-4, respectively, across all treatment groups.

[0050] FIG. 33 shows the effect of bacterial media and bacterial compositions DE916091.1, DE821956.1, and DE122435.3 on tumor cells in an in vitro CD8 cytotoxicity assay.

[0051] FIGS. 34A, 34B, 34C, 34D, and 34E show the effects of single bacterial strains on human T cells in an in vitro assay. FIGS. 34A, 34B, 34C, 34D, and 34E show the comparison of all treatment groups in normalized gene counts of the expression of IFN γ, TNFα, perforin, GzmB and CD69, respectively.

[0052] FIGS. 35A and 35B show the effect of single bacterial strains tumor cells in an in vitro CD8 cytotoxicity assay. FIGS. 35A and 35B compare survival of HT29 target cells when the CD8 T cells were treated with supernatants from single bacterial strains.

[0053] FIG. 36 is a graph showing body weight change (%) days after 5-FU (fluorouracil) treatment.

[0054] FIGS. 37A, 37B, 37C, 37D, 37E, 37F, 37G, 37H, 37I, 37J, 37K, 37L, 37M, 37N, 37O, 37P, 37Q, and 37R are graphs showing cytokine concentration in serum at 5 and 8 days after 5-FU (fluorouracil) treatment. FIGS. 37A, 37C, 37E, 37G, 37I, 37K, 37M, 37O, and 37Q show the average serum concentrations of duplicates, while FIGS. 37B, 37D, 37F, 37H, 37J, 37L, 37N, 37P, and 37R show serum concentrations of duplicates.

[0055] FIG. 38 is a heat map showing cytokine concentration in serum at 5 and 8 days after 5-FU (fluorouracil) treatment across the panel of cytokines.

### DETAILED DESCRIPTION

[0056] Applicant has discovered that bacterial compositions comprising certain species of commensal bacteria exhibit certain functional features (e.g., those disclosed herein), and that such compositions can be used to treat and/or reduce the risk of one or more of an infection (including, but not limited to, blood stream infection, sepsis, tissue infection, invasive infection, viral infection or reactivation, and gastrointestinal infection), graft-versus-host-disease (GvHD), or mucositis, e.g., in a subject undergoing HSCT or having cancer. Accordingly, Applicant has identified species of commensal bacteria that can be combined to design bacterial compositions disclosed herein. Detailed disclosure of the bacterial species and the functional features of interest are provided in the present disclosure.

### I. Bacterial (Microbiome) Compositions

[0057] Bacteria, including one or more OTU or species of bacteria, discovered to be associated with certain functional features (e.g., those described herein) can be used to design therapeutic compositions or designed compositions (DEs) for treating and/or preventing a range of diseases and disorders, such as an infection or GvHD, for example, following HSCT in a subject. Such compositions can include material directly derived from feces of healthy humans or such compositions can include material fermented from bacterial cultures, including a biologically pure culture. The designed compositions comprising material directly derived from human feces can, in some aspects, contain spore-forming bacteria (SFB) derived from human feces as the sole type of bacteria present in the composition. In some aspects, such designed compositions can comprise spores as the sole type of bacteria present in the composition (healthy human spore product; HHSP). Collectively, SFB and HHSP are referred to herein as “spore compositions.”

[0058] In some aspects, one or more bacteria associated with an improvement in a disease or disorder (e.g., an infection or GvHD, such as that observed with HSC transplantation) can be combined to produce the designed compositions disclosed herein. In certain aspects, one or more bacteria associated with certain functional features of interest (e.g., those described herein) can be combined in the bacterial compositions disclosed herein. By combining different bacterial species disclosed herein, the designed compositions disclosed herein can target different biological pathways. Not to be bound by any particular theory, such ability allows the designed compositions disclosed herein to be useful for the treatment of a wide range of diseases and disorders, e.g., those associated with infection, GvHD, or mucositis, e.g., in a subject undergoing HSCT, as well as other diseases and disorders related to immune suppression described herein. Species in a designed composition can be spore-formers (in some cases, in spore form), non-spore formers, or a combination thereof. Species in a designed composition can include material directly derived from feces of healthy humans or such compositions can include material fermented from bacterial cultures, including a biologically pure culture. Collectively, spore compositions and designed compositions are referred to herein as “microbiome compositions.”

[0059] Provided herein are bacteria and combinations of bacteria useful for treating and/or preventing one or more signs or symptoms of a disease or disorder associated with dysbiosis of the gastrointestinal microbiome, e.g., infection or GvHD following HSCT. In general, such compositions include one or more of the bacteria described herein and/or one more of the bacteria described herein as exhibiting one or more of the functional features of interest disclosed herein (e.g., reduced morbidity and mortality in HSCT patients or having one or more features associated with reduced morbidity and mortality in HSCT patients).

[0060] In some aspects, the amount, level, identity, presence, and/or ratio of bacteria in the microbiome (e.g., gastrointestinal microbiome) of a subject is manipulated to treat, prevent, delay, or ameliorate one or more signs or symptoms of a disease or disorder associated with dysbiosis of the gastrointestinal microbiome (e.g., infection or GvHD following HSCT). In some aspects, the amount, level, identity, presence, and/or ratio of bacteria in the microbiome (e.g., gastrointestinal microbiome) of a subject is manipulated to treat, prevent, delay, or ameliorate one or more signs or symptoms of a disease or disorder described herein.

[0061] The term “microbial engraftment” or “engraftment” refers to the establishment of OTUs (bacterial species or strains) comprising a therapeutic microbial composition, e.g., a bacterial composition, in a target niche that are absent or undetectable in a treated subject prior to treatment. The microbes comprising the engrafted ecology are present in the therapeutic microbial composition and establish as constituents of the subject's microbial ecology. Engrafted OTUs can establish for a transient period of time, or demonstrate long-term stability in the microbial ecology that populates the subject post treatment with a therapeutic microbial composition. Without committing to any theory, the drug product (i.e., bacterial compositions disclosed herein) may catalyze a shift from a dysbiotic ecology to one representative of a healthy state, either by engraftment of drug product species, promoting ecological conditions favorable for the growth of non-product commensal microbes present in the patient (augmentation), or both.

[0062] As used herein, engraftment is indicated by one or more of the following outputs: (i) strain level engraftment, (ii) species-level population engraftment, (iii) species-level subject engraftment, and (iv) putative engraftment. “Strain level engraftment” is determined using any relevant method known in the art. In some aspects, strain level engraftment is determined using an assay in which single nucleotide variant (SNV) frequencies unique to the drug product composition are used to determine whether strains of species detected in treated subjects are significantly more similar to strains in the composition compared to strains of species detected in subjects prior to treatment. Strain level engraftment is measured on a per-subject and per-species basis. Non-limiting examples of other methods of determining strain level engraftment include the use of probes, e.g., NanoString nCounter probes that can be targeted to unique regions of the strain genome, relative to other known genomic sequences of the same species, or compared to metagenomics datasets from healthy subjects; or specific PCR probes for the particular species or strain of interest. “Species-level population engraftment” refers to significantly increased prevalence (p<=0.05) of a species in treated subjects relative to non-treated subjects at any post-treatment time point as measured with a Fisher's exact test, with the requirement that the species was not detected in treated subjects prior to treatment but was detected in the composition. Species-level population engraftment is a population-level measure and requires a significant (p<=0.05) difference across the population treated with a particular regimen compared to placebo. “Species-level subject engraftment” refers to the detection of a species present in the HHSP in a subject post-treatment when said species was not detected pre-treatment in that subject. “Putative engraftment” refers to significantly increased prevalence (p<=0.05) of a species in treated subjects relative to non-treated subjects at any post-treatment time point as measured with a Fisher's exact test. The putative engraftment further requires that the species was detected in the drug product composition and may or may not be present in the treated subject prior to treatment. “Putative engraftment” is a population level statistic. Putative engraftment can be further evaluated using strain level metrics for engraftment.

[0063] In some embodiments, the term engraftment can be further divided into long-term engraftment and transient engraftment. “Long-term engraftment” refers to the ability of bacterial species or strains disclosed herein to durably reside in the gastrointestinal tracts of subjects after treatment. Such species or strains are described herein as “long-term engrafter” (LTE). In some embodiments, long-term engrafters continue to be present in the subject (e.g., in the gastrointestinal tract) for about 4 weeks, about 8 weeks, about 12 weeks or longer after the start of dosing of a bacterial composition disclosed herein. “Transient engraftment” refers to the ability of bacterial species or strains (e.g., those disclosed herein) to reside in the gastrointestinal tracts of subjects after treatment, but are only detected in the fecal samples of subjects for a limited period of time. In some embodiments, if bacteria or combinations of bacteria are detected in the fecal sample of a subject, it is generally believed that those bacteria or combinations of bacteria remain present within the gastrointestinal tract. Such species or strains are described herein as “transient engrafter” (TE). In some embodiments, transient-engrafters are detected at one or more time points and not detected at another time point. In some embodiments, transient-engrafters are no longer detected in the subject (e.g., no longer detected in the fecal sample of the subject) about 1 week, about 2 weeks, or about 4 weeks after the start of dosing (i.e., administering a bacterial composition disclosed herein).

[0064] It is a key feature of a microbiome composition (e.g., designed compositions) as provided herein that one or more species or OTUs of bacteria in the microbiome composition engraft in a subject treated with the composition, e.g., a subject that responds to the treatment by an improvement in at least one sign or symptom of the disease being treated. In some embodiments, a microbiome composition disclosed herein comprises one or more species or OTUs of bacteria that are long-term engrafters. In other embodiments, a microbiome composition comprises one or more species or OTUs of bacteria that are transient engrafters. In certain embodiments, a microbiome composition comprises both long-term engrafters and transient engrafters. In certain embodiments, a bacterial composition disclosed herein comprises two, three, four, five, six, seven, eight, nine, ten or more long-term engrafters. In some embodiments, a bacterial composition comprises two, three, four, five, six, seven, eight, nine, ten or more transient engrafters. In further embodiments, a bacterial composition disclosed herein comprises three or more transient engrafters and/or three or more long-term engrafters, four or more transient engrafters and/or four or more long-term engrafters, five or more transient engrafters and/or four or more long-term engrafters, six or more transient engrafters and/or four or more long-term engrafters, seven or more transient engrafters and/or four or more long-term engrafters, eight or more transient engrafters and/or four or more long-term engrafters, nine or more transient engrafters and/or four or more long-term engrafters, or ten or more transient engrafters and/or four or more long-term engrafters. In any such embodiments, the bacterial composition disclosed herein can also include one, two, three, four, five, six, seven, eight, nine, ten or more species not defined as long-term or transient engrafters. In further embodiments, a bacterial composition disclosed herein comprises ten or more transient engrafters and/or four or more long-term engrafters and/or two or more species not defined as either.

[0065] As used herein, “augmentation” refers to the establishment or significant increase of a population of microbes, or selected species or OTUs, that are (i) absent or undetectable (as determined by the use of known and/or specified genomic or microbiological techniques) in an administered therapeutic microbiome composition, (ii) absent, undetectable, or present at low frequencies in the host niche (as example: gastrointestinal tract (GI tract), skin, anterior-nares, or vagina) before treatment with the microbiome composition compared to after treatment with the microbiome composition, and (iii) are found in the host (subject) after the administration of the microbiome composition or are significantly increased after treatment, for instance about 2-fold, about 5-fold, about 1×10², about 1×10³, about 1×10⁴, about 1×10⁵, about 1×10⁶, about 1×10⁷ fold, or greater than 1×10⁸ fold, in cases where they were present at low frequencies. Microbes comprising an augmented population can be derived from exogenous sources such as food and the environment or grow out from micro-niches within the host where they reside at low frequency. In some aspects of the invention, after treatment with a microbiome composition as provided herein, one or more species or OTUs of bacteria are augmented in the treated subject, e.g., a subject that responds to the treatment by an improvement in at least one sign or symptom of the disease being treated.

[0066] Without committing to any theory, administration of a therapeutic microbiome composition may induce a shift in the target niche, e.g., the GI tract, that promotes favorable conditions for the growth of certain commensal microbes causing them to increase in abundance, i.e., they are augmented. In the absence of treatment with a therapeutic microbiome composition, although the host may be exposed to or harbor these commensal microbes, higher abundance and functions and benefits associated with those microbes are not observed or are less frequently observed in a population treated with the microbiome composition.

[0067] In some embodiments, a bacterial composition comprises a population of bacteria that has been purified from a biological material (e.g., fecal materials, such as feces or materials isolated from the various segments of the small and large intestines) obtained from a mammalian donor subject (e.g., a healthy human). In some embodiments, the biological material (e.g., fecal material) is obtained from multiple donors (e.g., 2, 3, 4, 5, 6, 7, 8, 9, 10, 15, 20, 25, 30, 35, 40, 45, 50, 75, 100, 200, 300, 400, 500, 750, 1000, or from greater than 1000 donors), and the materials are pooled prior to purification or after purification of the desired bacteria. In other embodiments, the biological material (sample) can be obtained from a single donor subject at multiple times and two or more samples pooled, e.g., 2, 3, 4, 5, 6, 7, 8, 9, 10, 15, 20, 25, 30, 32, 35, 40, 45, 48, 50, 100 samples from a single donor. Methods of making such preparations include treatment of the feces with chloroform, acetone, ethanol, and the like, e.g., see PCT/US2014/014745 and U.S. Pat. No. 9,011,834, which are incorporated herein by reference in their entirety.

[0068] In some embodiments, a microbiome composition derived from bacterial cultures, or that is or was derived from feces, is depleted in residual habitat products. “Residual habitat products” refers to material derived from the habitat of a microbiota within or on a human or animal excluding the microbiota. An individual's microbiota is in, for example, feces in the gastrointestinal tract, on the skin itself, in saliva, mucus of the respiratory tract, or secretions of the genitourinary tract, all of which contain biological and other matter associated with the microbial community. “Substantially free of residual habitat products” means that the bacterial composition contains a reduced amount of the biological matter associated with the microbial environment on or in the human or animal subject and is about 100% free, about 99% free, about 98% free, about 97% free, about 96% free, or about 95% free of any contaminating biological matter associated with the microbial community or the contaminating matter is below a level of detection. Residual habitat products can include abiotic materials (including undigested food) or it can include unwanted microorganisms. Substantially free of residual habitat products can also mean that the bacterial composition contains no detectable cells from a human or animal and that only microbial cells are detectable. In some embodiments, substantially free of residual habitat products can mean that the bacterial composition contains no detectable viral (including bacterial viruses (i.e., phage)), fungal, mycoplasmal contaminants. In other embodiments, it means that fewer than about 1×10⁻²%, about 1×10⁻³%, about 1×10⁻⁴%, about 1×10⁻⁵%, about 1×10⁻⁶%, about 1×10⁻⁷%, about 1×10⁻⁸% of the viable cells in the bacterial composition are human or animal, as compared to microbial cells. There are multiple ways to accomplish reduced presence of residual habitat products, none of which are limiting. Thus, contamination can be reduced by isolating desired constituents through multiple steps of streaking to single colonies on solid media until replicate (such as, but not limited to, two) streaks from serial single colonies have shown only a single colony morphology. Alternatively, reduction of contamination can be accomplished by multiple rounds of serial dilutions to single desired cells (e.g., a dilution of about 10⁻⁸ or about 10⁻⁹), such as through multiple 10-fold serial dilutions. This can further be confirmed by showing that multiple isolated colonies have similar cell shapes and Gram staining behavior. Other methods for confirming adequate reduction of residual habitat products include genetic analysis (e.g., PCR, DNA sequencing), serology and antigen analysis, enzymatic and metabolic analysis, and methods using instrumentation such as flow cytometry with reagents that distinguish desired constituents from contaminants. In some embodiments, in a microbiome composition disclosed herein, the bacterial material is substantially composed of viable bacterial spores as the live component. In some embodiments, in a microbiome composition disclosed herein, the bacterial mixture is substantially composed of viable bacteria in the vegetative-state as the live component. In some embodiments, in a microbiome composition disclosed herein, the bacterial mixture is composed of viable bacterial spores and viable bacteria in the vegetative state as the live component.

[0069] As used herein, the term “spore” or “endospore” refers to an entity, particularly a bacterial entity, which is in a dormant, non-vegetative and non-reproductive stage. Spores are generally resistant to environmental stress such as radiation, desiccation, enzymatic treatment, temperature variation, nutrient deprivation, oxygen, and chemical disinfectants. In some embodiments, a spore or spore population is resistant to 50% ethanol.

[0070] A “spore population” refers to a plurality of spores present in a composition. Synonymous terms used herein include spore composition, spore preparation, ethanol treated spore fraction and spore ecology. A spore population can be purified from a fecal donation, e.g., via ethanol or heat treatment, or a density gradient separation or any combination of methods described herein to increase the purity, potency and/or concentration of spores in a sample. Alternatively, a spore population can be derived through culture methods starting from isolated spore former species or spore former OTUs or from a mixture of such species, either in vegetative or spore form.

[0071] In some embodiments, the spore preparation comprises spore forming species wherein residual non-spore forming species have been inactivated by chemical or physical treatments including ethanol, detergent, heat, sonication, and the like; or wherein the non-spore forming species have been removed from the spore preparation by various separations steps including density gradients, centrifugation, filtration and/or chromatography; or wherein inactivation and separation methods are combined to make the spore preparation. In yet another embodiment, the spore preparation comprises spore forming species that are enriched over viable non-spore formers or vegetative forms of spore formers. In this embodiment, spores are enriched by about 2-fold, about 5-fold, about 10-fold, about 50-fold, about 100-fold, about 1000-fold, about 10,000-fold or greater than about 10,000-fold compared to all vegetative forms of bacteria. In yet another embodiment, the spores in the spore preparation undergo partial germination during processing and formulation such that the final composition comprises spores and vegetative bacteria derived from spore forming species.

[0072] The term “germinant” refers to a material or composition or physical-chemical process capable of inducing vegetative growth of a bacterium that is in a dormant spore form, or group of bacteria in the spore form, either directly or indirectly in a host organism and/or in vitro.

[0073] The term “sporulation induction agent” refers to a material or physical-chemical process that is capable of inducing sporulation in a bacterium, either directly or indirectly, in a host organism and/or in vitro.

[0074] The term “increase production of bacterial spores” includes an activity or a sporulation induction agent. “Production” in this context includes conversion of vegetative bacterial cells into spores and augmentation of the rate of such conversion, as well as decreasing the germination of bacteria in spore form, decreasing the rate of spore decay in vivo, or ex vivo, or to increasing the total output of spores (e.g., via an increase in volumetric output of fecal material).

[0075] In some embodiments, the preparation of a spore composition includes suspending a sample in ethanol, e.g., at least about 30%, at least about 40%, at least about 50%, at least about 55%, at least about 60%, at least about 65%, at least about 70%, at least about 75%, at least about 80%, at least about 85%, at least about 90%, at least about 95%, or at least about 100%. In some cases, the preparation of a spore composition includes suspending a sample in about 30 to about 100% ethanol, about 40 to about 80% ethanol, about 50 to about 80% ethanol, about 30% ethanol, about 40% ethanol, about 50% ethanol, about 55% ethanol, about 60% ethanol, about 65% ethanol, about 70% ethanol, about 75% ethanol, about 80% ethanol, about 85% ethanol, about 90% ethanol, about 95% ethanol, or about 100%.

[0076] As used herein, the terms “purify”, “purified” and “purifying” refer to the state of a population (e.g., a plurality of known or unknown amount and/or concentration) of desired bacteria or bacterial spores, that have undergone one or more processes of purification, e.g., a selection or an enrichment of the desired bacterium and/or bacterial spores, or alternatively a removal or reduction of residual habitat products as described herein. In some embodiments, a purified population has no detectable undesired activity or, alternatively, the level or amount of the undesired activity is at or below an acceptable level or amount. In other embodiments, a purified population has an amount and/or concentration of desired bacteria or bacterial spores, e.g., in general or of selected species, at or above an acceptable amount and/or concentration. In other embodiments, the ratio of desired-to-undesired activity (e.g., spores compared to vegetative bacteria), has changed by about 2-fold, about 5-fold, about 10-fold, about 30-fold, about 100-fold, about 300-fold, about 1×10⁴, about 1×10⁵, about 1×10⁶, about 1×10⁷, about 1×10⁸, or greater than about 1×10⁸. In other embodiments, a purified population of bacterial spores is enriched as compared to the starting material (e.g., a fecal material) from which the population is obtained. This enrichment can be by about 10%, about 20%, about 30%, about 40%, about 50%, about 60%, about 70%, about 80%, about 90%, about 95%, about 96%, about 97%, about 98%, about 99%, about 99.9%, about 99.99%, about 99.999%, about 99.9999%, about 99.99999%, or greater than about 99.999999% as compared to the starting material.

[0077] In some embodiments, a purified population of bacteria has reduced or undetectable levels of one or more pathogens (e.g., pathogenic bacteria, viruses, or fungi), or one or more pathogenic activities, such as toxicity, an ability to cause infection of the mammalian recipient subject, an undesired immunomodulatory activity, an autoimmune response, a metabolic response, or an inflammatory response or a neurological response. In some embodiments, the pathogen or pathogenic activity of the bacteria is reduced by at least about 5%, at least about 10%, at least about 20%, at least about 30%, at least about 40%, at least about 50%, at least about 60%, at least about 70%, at least about 80%, at least about 90%, at least about 95%, at least about 96%, at least about 97%, at least about 98%, at least about 99% compared to the reference pathogen or bacteria. In some embodiments, a purified population of bacteria has reduced sensory components as compared to fecal matter, such as reduced odor, taste, appearance, and umami.

[0078] In some embodiments, a bacterial composition disclosed herein is substantially free of residual habitat products and/or substantially free of a detectable level of a pathogenic material (e.g., contains no detectable viral (including bacterial viruses (i.e., phage)), fungal, mycoplasmal, or toxoplasmal contaminants, or eukaryotic parasites, such as a helminth; or has an acceptable level of the foregoing. In some embodiments, a bacterial composition is substantially free of acellular material (e.g., DNA, viral coat material, or non-viable bacterial material).

### Designed Compositions (DEs)

[0079] Applicant has discovered that certain families, genera, species, and OTUs of bacteria are associated with an improvement (e.g., reduction of risk of infection or GvHD) of a disease or disorder associated with dysbiosis of the gastrointestinal microbiome (e.g., infection or GvHD following HSCT). Furthermore, some of those families, genera, species, and OTUs were associated with engraftment. In addition, some families, genera, species, and OTUs were not present and/or not detected in a subject suffering from a disease or disorder associated with dysbiosis of the gastrointestinal tract (e.g., in a patient suffering from recurrence of C. difficile infection or ulcerative colitis) and were augmented in a subject whose disease state was improved after treatment with an HHSP or a DE. Such bacteria that are associated with improvement in a subject are useful in compositions for treating a disease or disorder associated with dysbiosis (e.g., infection or GvHD following HSCT). Furthermore, applicant has discovered that certain species are positively or negatively associated with an improvement in disease or disorder associated with dysbiosis without intervention from a microbiome composition. In general, such negatively associated species are not included in a composition useful for treating such diseases. In other aspects, such positively associated species may be included in a composition useful for treating such diseases. Applicants have further identified families, genera, species, and OTUs of bacteria that exhibit certain functional features that can be useful in treating a wide range of diseases and disorders, including those associated with dysbiosis of the gastrointestinal tract (e.g., infection or GvHD following HSCT).

[0080] Accordingly, disclosed herein are microbiome compositions that have been designed to exhibit certain features (and as such are designed compositions such as DE8, DE10, DE11, or DE23 recited in FIG. 1). Non-limiting examples of such features include: (i) capable of engrafting (long-term and/or transient) when administered to a subject, (ii) capable of having anti-inflammatory activity in epithelial cells (e.g., inhibiting TNF-α-driven IL-8 secretion in epithelial cells in vitro, ability to down-modulate expression of inflammatory genes (e.g., CXCL1, CXCL2, CXCL3, CXCL11, ICAM1)), (iii) not capable of inducing pro-inflammatory activity, (iv) capable of producing a secondary bile acid (e.g., 7α-dehydroxylase and bile salt hydrolase activity), (v) capable of producing a tryptophan metabolite (e.g., indole, 3-methyl indole, indolepropionic acid), (vi) capable of restoring epithelial integrity as determined by a primary epithelial cell monolayer barrier integrity assay, (vii) capable of being associated with reduction of risk of infection or GvHD following HSCT, (viii) capable of not being associated with clinical non-remission of infection or GvHD following HSCT, (ix) capable of producing a short-chain fatty acid (e.g., butyrate, propionate), (x) capable of inhibiting a HDAC activity, (xi) capable of producing a medium-chain fatty acid (e.g., valerate, hexanoate), (xii) capable of expressing catalase activity, (xiii) capable of having alpha-fucosidase activity, (xiv) capable of inducing Wnt activation, (xv) capable of producing a B vitamin (e.g., thiamin (B1) and/or pyridoxamine (B6)), (xvi) capable of reducing fecal calprotectin level, (xvii) not capable of activating a toll-like receptor pathway (e.g., TLR4 or TLR5), (xviii) capable of activating a toll-like receptor pathway (e.g., TLR2), (xix) capable of restoring colonization resistance, (xx) capable of a broad range of carbon source utilization; (xxi) capable of reducing VRE pathogen carriage, (xxii) capable of reducing CRE pathogen carriage, (xxiii) capable of coadministration with a carrier or excipient described herein, without substantially decreasing the therapeutic benefit of the administered species, (xxiv) capable of being associated with the healthy human gut microbiota, (xxv) capable of not being associated with toxin and hemolysin genes associated with Clostridial pathogens and no significant cytopathic effects in vitro, (xxvi) susceptible to multiple clinically relevant antibiotics, (xxvii) capable of not being associated with genes that are both likely responsible for the observed antibiotic resistances and transmissible, (xxxviii) capable of inhibiting epithelial cell apoptosis, (xxix) capable of down-modulating one or more genes induced in IFN-γ treated colonic organoids (e.g., those associated with inflammatory chemokine signaling, NF-κB signaling, TNF family signaling, type I interferon signaling, type II interferon signaling, TLR signaling, lymphocyte trafficking, Th17 cell differentiation, Th2 differentiation, apoptosis, inflammasomes, autophagy, oxidative stress, MEW class I and II antigen presentation, complement, mTor, nod-like receptor signaling, PI3K signaling, or combinations thereof), (xxx) capable of reducing the expression of one or more inhibitory receptors (e.g., TIGIT, TIM-3, or LAG-3) on CD8+ T cells, (xxxi) capable of increasing expression of one or more genes/proteins associated with CD8+ T cell activation and/or function (e.g., CD45RO, CD69, IL-24, TNF-α, perforin, or IFN-γ), (xxxii) capable of enhancing the ability of CD8+ T cells to kill tumor cells, (xxxiii) capable of enhancing the efficacy of an immune checkpoint inhibitor therapy, (xxxiv) capable of promoting the recruitment of CD8+ T cells to tumors, (xxxv) capable of inducing an anti-inflammatory IL-10-skewed IL-10/IL-6 cytokine ratio in macrophages, (xxxvi) capable of inducing less inflammatory responses but similar pathogen defense responses in macrophages than a donor-derived spore-based composition, (xxxvii) capable of increasing the amount of anti-inflammatory mediators in (e.g., IL-1 receptor antagonists (IL-1RA), IL-4, IL-6, IL-10, IL-11, IL-13, TGF-β), (xxxviii) capable of reducing colonic inflammation, (xxxix) capable of treating and/or preventing a disease or disorder, such as those associated with dysbiosis of a gastrointestinal tract, (xl) capable of increasing the diversity of the gastrointestinal microbiome in a subject, (xli) capable of improving mucosal and/or epithelial barrier integrity in a subject compared to a reference control (e.g., untreated patients or the subject prior to treatment), (xlii) capable of promoting mucosal healing, (xliii) capable of reducing incidence of infection, (xliv) capable of reducing the need for antibiotics in a subject, (xlv) capable of increasing the probability of survival in a subject, (xlvi) capable of reducing the risk of relapse of primary cancer, (xlvii) capable of reducing the abundance of a biomarker of infection in the stool of a subject, (xlviii) capable of increasing the abundance of a biomarker of an administered species in the stool of a subject, (xlix) capable of targeted delivery of most (e.g., 70%, 75%, 80%, 85%, 90%, 95%, 96%, 97%, 98%, 99%, 99.5%, 99.6%, 99.7%, 99.8%, or 99.9% of the administered species relative to the number of colony forming units administered) or all of the administered species to the intestines of the subject (e.g., through encapsulation, or through coating one or more components of a dosage form with an enteric polymer), (l) capable of a therapeutic benefit following a single administration of a composition or pharmaceutical composition described herein to a subject, (li) capable of coadministration with an additional agent described herein, without substantially decreasing the therapeutic benefit of the administered species, (lii) capable of increasing the Treg:Th1 or Treg:Th17 ratios on the lamina propria of mice, or any combination thereof. Non-limiting examples of designed compositions are described, e.g., in FIG. 1. In some embodiments, a designed composition disclosed herein comprises one, two, three, four, five, six, seven, eight, nine, ten, eleven, twelve, thirteen, fourteen, fifteen, sixteen, seventeen, eighteen, nineteen, twenty, twenty-one, twenty-two, twenty-three, twenty-four, twenty-five, twenty-six, twenty-seven, twenty-eight, twenty-nine, thirty, thirty-one, thirty-two, thirty-three, thirty-four, thirty-five, thirty-six, thirty-seven, thirty-eight, thirty-nine, forty, forty-one, forty-two, forty-three, forty-four, forty-five, forty-six, forty-seven, forty-eight, forty-nine, fifty, fifty-one, fifty-two, fifty-three, or all of the above features. In certain embodiments, a designed composition of the present disclosure can comprise features that target multiple biological pathways, such that the same composition can be used to treat a wide range of diseases and disorders. e.g., in FIG. 1. In some embodiments, a designed composition disclosed herein comprises one, two, three, four, five, six, seven, eight, nine, ten, eleven, twelve, thirteen, fourteen, fifteen, sixteen, seventeen, eighteen, nineteen, twenty, twenty-one, twenty-two, twenty-three, twenty-four, twenty-five, twenty-six, twenty-seven, twenty-eight, twenty-nine, thirty, thirty-one, thirty-two, thirty-three, thirty-four, thirty-five, thirty-six, thirty-seven, thirty-eight, thirty-nine, forty, forty-one, forty-two, forty-three, forty-four, forty-five, forty-six, forty-seven, forty-eight, forty-nine, fifty, fifty-one, fifty-two, or all of the above features. In certain embodiments, a designed composition of the present disclosure such as DE122435.3 can comprise features that target multiple biological pathways, such that the same composition can be used to treat a wide range of diseases and disorders.

[0081] In some embodiments, a bacterial composition disclosed herein (such as DE8, DE10, DE11, or DE23 recited in FIG. 1) comprises one or more features selected from (i) capable of engrafting (long-term and/or transient) when administered to a subject, (ii) capable of having anti-inflammatory activity (e.g., inhibiting TNF-α-driven IL-8 secretion in epithelial cells in vitro, ability to downmodulate expression of inflammatory genes (e.g., CXCL1, CXCL2, CXCL3, CXCL11, ICAM1)), (iii) not capable of inducing pro-inflammatory activity, (iv) capable of producing a secondary bile acid (7α-dehydroxylase and bile salt hydrolase activity), (v) capable of producing a tryptophan metabolite (e.g., indole, 3-methyl indole, indolepropionic acid), (vi) capable of restoring epithelial integrity as determined by a primary epithelial cell monolayer barrier integrity assay, (vii) capable of being associated with reduction of risk of infection or GvHD following HSCT, (viii) capable of not being associated with clinical non-remission of infection or GvHD following HSCT, (ix) capable of producing a short-chain fatty acid (e.g., butyrate, propionate), (x) capable of inhibiting a HDAC activity, (xi) capable of producing a medium-chain fatty acid (e.g., valerate, hexanoate), (xii) capable of expressing catalase activity, (xiii) capable of having alpha-fucosidase activity, (xiv) capable of inducing Wnt activation, (xv) capable of producing a B vitamin (e.g., thiamin (B1) and/or pyridoxamine (B6)), (xvi) capable of reducing fecal calprotectin level, (xvii) not capable of activating a toll-like receptor pathway (e.g., TLR4 or TLR5), (xviii) capable of activating a toll-like receptor pathway (e.g., TLR2), (xix) capable of restoring colonization resistance, (xx) capable of a broad range of carbon source utilization; (xxi) capable of reducing VRE pathogen carriage, (xxii) capable of reducing CRE pathogen carriage, (xxiii) capable of reducing colonic inflammation, (xxiv) capable of being associated with the healthy human gut microbiota, (xxv) capable of not being associated with toxin and hemolysin genes associated with Clostridial pathogens and no significant cytopathic effects in vitro, (xxvi) susceptible to multiple clinically relevant antibiotics, (xxvii) capable of not being associated with genes that are both likely responsible for the observed antibiotic resistances and transmissible, (xxviii) capable of inhibiting epithelial cell apoptosis, (xxix) capable of down-modulating one or more genes induced in IFN-γ treated colonic organoids (e.g., those associated with inflammatory chemokine signaling, NF-κB signaling, TNF family signaling, type I interferon signaling, type II interferon signaling, TLR signaling, lymphocyte trafficking, Th17 cell differentiation, Th1 differentiation, Th2 differentiation, apoptosis, inflammasomes, autophagy, oxidative stress, MHC class I and II antigen presentation, complement, mTor, nod-like receptor signaling, PI3K signaling, or combinations thereof), (xxx) capable of reducing the expression of one or more inhibitory receptors (e.g., TIGIT, TIM-3, or LAG-3) on T cells, (xxxi) capable of increasing expression of one or more genes/proteins associated with T cell activation and/or function (e.g., CD45RO, CD69, IL-24, TNF-α, perforin, or IFN-γ), (xxxii) capable of enhancing the ability of CD8+ T cells to kill tumor cells, (xxxiii) capable of enhancing the efficacy of an immune checkpoint inhibitor therapy, (xxxiv) capable of promoting the recruitment of CD8+ T cells to tumors, (xxxv) capable of inducing an anti-inflammatory IL-10-skewed IL-10/IL-6 cytokine ratio in macrophages; (xxxvi) capable of inducing less inflammatory responses but similar pathogen defense responses in macrophages than a donor-derived spore-based composition (i.e., a spore-based composition), (xxxvii) capable of producing IL-18, or any combination thereof.

[0082] In some embodiments, a bacterial composition disclosed herein (such as DE8, DE10, DE11, or DE23 recited in FIG. 1) comprises one or more features selected from: (i) ability to utilize a carbon source used by a pathogenic organism, such as but not limited to Enterococcus and Enterobacteriaceae species and ESKAPE pathogens (including: Enterococcus faecium, Staphylococcus aureus, Klebsiella pneumoniae, Acinetobacter baumannii, Pseudomonas aeruginosa, and Enterobacter spp.), Enterococcus species including, but not limited to, Enterococcus faecalis and Enterococcus faecium, Enterobacteriaceae species including, but not limited to, Klebsiella pneumonia, or such species that are resistant to vancomycin or carbapenems, drug resistant or multi-drug resistant (MDROs) including VRE, CRE (Klebsiella pneumonia, Klebsiella oxytoca, Klebsiella aerogenes, Enterococcus species), extended spectrum beta-lactamase (ESBLs) producing bacteria (E. coli, Klebsiella species), or methicillin-resistant Staphylococcus aureus (MRSA); (ii) ability to engraft when administered to a subject; (iii) ability to produce short-chain fatty acids; (iv) ability to produce medium-chain fatty acids; (v) ability to produce tryptophan metabolites; (vi) ability to inhibit histone deacetylase (HDAC) activity; (vii) ability to decrease IL-8 secretion in intestinal epithelial cells (IECs) treated with TNF-α; (viii) lack of induction of IL8 secretion in intestinal epithelial cells (IECs) in the absence of TNF-α; and combinations thereof. In some aspects, bacterial species with pro-inflammatory activity (e.g., able to induce IL-8 secretion in IECs) are specifically excluded from bacterial compositions disclosed.

[0083] In some embodiments, a bacterial composition disclosed herein (such as DE122435.3) comprises one or more features selected from: (1) reducing VRE and CRE carriage and restore colonization resistance in the GI tract of mice; (2) protecting the epithelial barrier from cytokine-mediated inflammatory damage (e.g., IFN-γ mediated); (3) reducing inflammation in the epithelial barrier, as measured by IL-8 secretion and modulation of inflammatory pathway gene expression in vitro, and in the colonic lamina propria of mice, e.g., as measured through an increased ratio of Treg cells to pro-inflammatory Th1 and Th17 cells, or a combination thereof.

[0084] In some embodiments, a bacterial composition disclosed herein (such as DE8, DE10, DE11, or DE23 recited in FIG. 1) comprises one or more features selected from: (1) capable of having anti-inflammatory activity in epithelial cells (e.g., inhibiting TNF-α-driven IL-8 secretion in epithelial cells in vitro, ability to down-modulate expression of inflammatory genes (e.g., CXCL1, CXCL2, CXCL3, CXCL11, ICAM1)), (2) not capable of inducing pro-inflammatory activity, (3) capable of producing a secondary bile acid (e.g., 7α-dehydroxylase and bile salt hydrolase activity), (4) capable of restoring epithelial integrity as determined by a primary epithelial cell monolayer barrier integrity assay, (5) capable of producing a short-chain fatty acid (e.g., butyrate, propionate), (6) capable of inhibiting a HDAC activity, (7) capable of producing a medium-chain fatty acid (e.g., valerate, hexanoate), (8) capable of restoring colonization resistance, (9) capable of reducing VRE pathogen carriage, (10) capable of reducing CRE pathogen carriage, (11) capable of inhibiting epithelial cell apoptosis, (12) capable of down-modulating one or more genes induced in IFN-γ treated colonic organoids (e.g., those associated with inflammatory chemokine signaling, NF-κB signaling, TNF family signaling, type I interferon signaling, type II interferon signaling, TLR signaling, lymphocyte trafficking, Th17 cell differentiation, Th2 differentiation, apoptosis, inflammasomes, autophagy, oxidative stress, MEW class I and II antigen presentation, complement, mTor, nod-like receptor signaling, PI3K signaling, or combinations thereof), (13) capable of reducing the expression of one or more inhibitory receptors (e.g., TIGIT, TIM-3, or LAG-3) on CD8+ T cells, (14) capable of increasing expression of one or more genes/proteins associated with CD8+ T cell activation and/or function (e.g., CD45RO, CD69, IL-24, TNF-α, perforin, or IFN-γ), (15) capable of enhancing the ability of CD8+ T cells to kill tumor cells, (16) capable of enhancing the efficacy of an immune checkpoint inhibitor therapy, (17) capable of increasing the Treg:Th1 or Treg:Th17 ratios on the lamina propria of mice, or any combination thereof.

[0085] In some embodiments, a bacterial composition disclosed herein (such as DE8, DE10, DE11, or DE23 recited in FIG. 1) comprises one or more features selected from: (1) capable of having anti-inflammatory activity in epithelial cells (e.g., inhibiting TNF-α-driven IL-8 secretion in epithelial cells in vitro, ability to down-modulate expression of inflammatory genes (e.g., CXCL1, CXCL2, CXCL3, CXCL11, ICAM1)), (2) not capable of inducing pro-inflammatory activity, (3) capable of restoring epithelial integrity as determined by a primary epithelial cell monolayer barrier integrity assay, (4) capable of inhibiting epithelial cell apoptosis, (5) capable of down-modulating one or more genes induced in IFN-γ treated colonic organoids (e.g., those associated with inflammatory chemokine signaling, NF-κB signaling, TNF family signaling, type I interferon signaling, type II interferon signaling, TLR signaling, lymphocyte trafficking, Th17 cell differentiation, Th2 differentiation, apoptosis, inflammasomes, autophagy, oxidative stress, MHC class I and II antigen presentation, complement, mTor, nod-like receptor signaling, PI3K signaling, or combinations thereof), (6) capable of reducing the expression of one or more inhibitory receptors (e.g., TIGIT, TIM-3, or LAG-3) on CD8+ T cells, (7) capable of increasing expression of one or more genes/proteins associated with CD8+ T cell activation and/or function (e.g., CD45RO, CD69, IL-24, TNF-α, perform, or IFN-γ), (8) capable of enhancing the ability of CD8+ T cells to kill tumor cells, (9) capable of enhancing the efficacy of an immune checkpoint inhibitor therapy, (10) capable of increasing the Treg:Th1 or Treg:Th17 ratios on the lamina propria of mice, or any combination thereof.

[0086] In some embodiments, a bacterial composition disclosed herein (such as DE8, DE10, DE11, or DE23 recited in FIG. 1) comprises one or more features selected from: (1) capable of having anti-inflammatory activity in epithelial cells (e.g., inhibiting TNF-α-driven IL-8 secretion in epithelial cells in vitro, ability to down-modulate expression of inflammatory genes (e.g., CXCL1, CXCL2, CXCL3, CXCL11, ICAM1)), (2) not capable of inducing pro-inflammatory activity, (3) capable of producing a secondary bile acid (e.g., 7α-dehydroxylase and bile salt hydrolase activity), (4) capable of restoring epithelial integrity as determined by a primary epithelial cell monolayer barrier integrity assay, (5) capable of producing a short-chain fatty acid (e.g., butyrate, propionate), (6) capable of inhibiting a HDAC activity, (7) capable of producing a medium-chain fatty acid (e.g., valerate, hexanoate), (8) capable of restoring colonization resistance, (9) capable of reducing VRE pathogen carriage, (10) capable of reducing CRE pathogen carriage, or any combination thereof.

[0087] In some embodiments, a bacterial composition disclosed herein (such as DE8, DE10, DE11, or DE23 recited in FIG. 1) comprises one or more features selected from: (1) capable of restoring colonization resistance, (2) capable of reducing VRE pathogen carriage, (3) capable of reducing CRE pathogen carriage, (4) capable of inhibiting epithelial cell apoptosis, or any combination thereof.

[0088] In some embodiments, the bacteria in a microbiome composition comprise one or more families, genera, species, or OTUs that are increased in the GI microbiome of a patient suffering from a disease or disorder associated with dysbiosis of the gastrointestinal tract (e.g., patients having infection or GvHD following HSCT) or population of patients prior to treatment with a complex microbiome composition, e.g., an HHSP or DE composition, and increased in a subject or a population of subjects after treatment with an HHSP or DE composition. In some embodiments, a bacterial composition disclosed herein comprises selected families, genera, species, or OTUs of bacteria. In general, the bacteria are commensal bacteria initially derived from, for example, a GI tract, typically the GI tract of a human, isolated and grown into pure cultures that can be used in a DE. These bacteria are selected for desired properties as described herein and used in designed composition. In some embodiments, a bacterial composition (e.g., designed compositions disclosed herein) comprises more than two types of bacteria. Accordingly, in some embodiments, a bacterial composition of the present disclosure comprises at least 2, at least 3, at least 4, at least 5, at least 6, at least 7, at least 8, at least 9, at least 10, at least 11, at least 12, at least 13, at least 14, at least 15, at least 16, at least 17, at least 18, at least 19, at least 20, or at least 21, 22, 23, 24, 25, 26, 27, 28, 29 30, 31, 32, 33, 34, 35, 36, 37, 38, 39, or at least 40, at least 50, or greater than 50 types of bacteria, as defined by species or operational taxonomic unit (OTU), or otherwise as provided herein. The bacteria in a composition may be present in approximately equal amounts of viable bacteria or each family, genus, species of OTU. In other embodiments of the invention, the bacteria are present in varying amounts in the composition. Non-limiting examples of bacterial species that can be used in designing the microbiome compositions disclosed herein are provided in Tables 1-3, FIG. 1-2A, FIG. 4E, and/or FIG. 4F.

[0089] In some embodiments, the bacteria in a microbiome composition disclosed herein are from a family, genus, species, or OTU depleted in a subject suffering from a disease or disorder, such as those associated with a dysbiosis (e.g., patients who become dysbiotic during HSCT and/or having infection or GvHD following HSCT) and/or typically present only at low levels or are absent in patients diagnosed with a disease or disorder, such as those associated with dysbiosis (e.g., infection or GvHD following HSCT). In some embodiments, a bacterial composition includes one or more additional bacteria that are present with high frequency in a population of healthy humans or subjects with a disease or disorder associated with dysbiosis (e.g., patients having infection or GvHD following HSCT) but who are not exhibiting symptoms associated with active disease. In some embodiments, a bacterial composition does not include one or more bacteria that are pathogenic or pathobiont species or OTU and/or bacteria that are present in an overabundance as observed on or before commencing HSCT.

[0090] In some embodiments, a bacterial composition disclosed herein comprises one or more bacteria from the family Ruminococcaceae, Lachnospiraceae, Sutterellaceae, Clostridiaceae, Erysipelotrichaceae, Bacteroidaceae, Akkermansiaceae, Peptostreptococcaceae, Eubacteriaceae, Clostridiales Family XIII, or Desulfovibrionaceae. In some embodiments, a bacterial composition can comprise at least one, two, three, four, five, six, seven, or all of the families listed.

[0091] In some embodiments, a bacterial composition comprises bacteria having at least about 97%, e.g., at least about 97%, at least about 97.5%, at least about 98%, at least about 98.5%, at least about 99%, identity to a 16S rDNA sequence (e.g., a full length or variable region of a 16S DNA sequence) to one or more of the following bacterial species: Eubacterium maltosivorans, Clostridium aldenense, Clostridium bolteae, Clostridium glycyrrhizinilyticum, Clostridium hylemonae, Clostridium innocuum, Clostridium lavalense, Clostridium scindens, Clostridium spiroforme, Clostridium symbiosum, Eubacterium rectale, Ruminococcus gnavus, Ruminococcus torques, Absiella dolichum, Agathobaculum desmolans, Akkermansia muciniphila, Alistipes finegoldii, Alistipes shahii, Anaerofustis stercorihominis, Anaeromassilibacillus senegalensis, Anaerostipes caccae, Anaerotruncus colihominis, Bacteroides caccae, Faecalibacterium prausnitzii, Faecalicatena contorta, Faecalicatena orotica, Flavonifractor plautii, Gemmiger formicilis, Harryflintia acetispora, Holdemania filiformis, Holdemania massiliensis, Intestinimonas butyriciproducens, Lachnospira pectinoschiza, Lachnospiraceae bacterium 5 1 57FAA, Lactobacillus fermentum, Lactonifactor longoviformis, Longibaculum muris, Longicatena caecimuris, Murimonas intestina, Oscillibacter ruminantium, Bacteroides eggerthii, Bacteroides faecis, Bacteroides intestinalis, Bacteroides koreensis, Bacteroides kribbi, Bacteroides salyersiae, Bacteroides uniformis, Bacteroides vulgatus, Bacteroides xylanisolvens, Barnesiella intestinihominis, Bifidobacterium dentium, Bifidobacterium longum, Bifidobacterium stercoris, Blautia coccoides, Blautia hominis, Blautia hydrogenotrophica, Blautia luti, Blautia obeum, Blautia producta, Blautia wexlerae, Butyricimonas faecihominis, Cellulosilyticum lentocellum, Clostridium butyricum, Ruthenibacterium lactatiformans, Sellimonas intestinalis, Shigella flexneri, Terrisporobacter mayombei, Terrisporobacter petrolearius, Turicibacter sanguinis, Tyzzerella nexilis, Clostridium disporicum, Clostridium subterminale, Clostridium tertium, Collinsella aerofaciens, Coprococcus comes, Coprococcus eutactus, Dorea longicatena, Drancourtella massiliensis, Eggerthella lenta, Eisenbergiella tayi, Emergencia timonensis, Erysipelatoclostridium ramosum, Eubacterium callanderi, Paeniclostridium sordellii, Parabacteroides distasonis, Parabacteroides merdae, Paraclostridium bifermentans, Peptostreptococcus stomatis, Robinsoniella peoriensis, Romboutsia timonensis, Roseburia intestinalis, Roseburia inulinivorans, Ruminococcus albus, Ruminococcus bromii, Ruminococcus faecis, or Ruminococcus lactaris. In some embodiments, a bacterial composition can comprise at least one, two, three, four, five, six, seven, eight, nine, ten, eleven, twelve, thirteen, fourteen, fifteen, sixteen, seventeen, eighteen, nineteen, twenty, twenty-five, thirty, thirty-five, forty, forty-five, fifty, or all of the species listed.

[0092] In some embodiments, a bacterial composition comprises bacteria having at least about 97%, e.g., at least about 97%, at least about 97.5%, at least about 98%, at least about 98.5%, at least about 99%, identity to a 16S rDNA sequence (e.g., a full length or variable region of a 16S DNA sequence) to one or more of the following bacterial species: Absiella dolichum, Agathobaculum desmolans, Akkermansia muciniphila, Alistipes finegoldii, Alistipes onderdonkii, Alistipes putredinis, Alistipes senegalensis, Alistipes shahii, Alistipes timonensis, Anaerofustis stercorihominis, Anaeromassilibacillus senegalensis, Anaerostipes caccae, Anaerotruncus colihominis, Atlantibacter hermannii, Atlantibacter subterranea, Bacteroides caccae, Bacteroides cellulosilyticus, Bacteroides eggerthii, Bacteroides faecichinchillae, Bacteroides faecis, Bacteroides finegoldii, Bacteroides intestinalis, Bacteroides koreensis, Bacteroides kribbi, Bacteroides oleiciplenus, Bacteroides ovatus, Bacteroides rodentium, Bacteroides salyersiae, Bacteroides stercorirosoris, Bacteroides thetaiotaomicron, Bacteroides uniformis, Bacteroides vulgatus, Bacteroides xylanisolvens, Barnesiella intestinihominis, Bifidobacterium adolescentis, Bifidobacterium catenulatum, Bifidobacterium dentium, Bifidobacterium faecale, Bifidobacterium kashiwanohense, Bifidobacterium longum, Bifidobacterium pseudocatenulatum, Bifidobacterium ruminantium, Bifidobacterium stercoris, Blautia coccoides, Blautia hansenii, Blautia hominis, Blautia hydrogenotrophica, Blautia luti, Blautia marasmi, Blautia obeum, Blautia producta, Blautia stercoris, Blautia wexlerae, Brenneria alni, Butyricimonas faecihominis, Cedecea lapagei, Cellulosilyticum lentocellum, Citrobacter amalonaticus, Citrobacter farmers, Citrobacter koseri, Citrobacter sedlakii, Citrobacter youngae, Clostridium aldenense, Clostridium asparagiforme, Clostridium beijerinckii, Clostridium bolteae, Clostridium butyricum, Clostridium carnis, Clostridium celatum, Clostridium chauvoei, Clostridium chromiireducens, Clostridium citroniae, Clostridium clostridioforme, Clostridium cocleatum, Clostridium dakarense, Clostridium diolis, Clostridium disporicum, Clostridium glycyrrhizinilyticum, Clostridium hylemonae, Clostridium innocuum, Clostridium lavalense, Clostridium paraputrificum, Clostridium puniceum, Clostridium quinii, Clostridium saccharobutylicum, Clostridium saccharoperbutylacetonicum, Clostridium sartagoforme, Clostridium saudiense, Clostridium scindens, Clostridium septicum, Clostridium spiroforme, Clostridium subterminale, Clostridium sulfidigenes, Clostridium symbiosum, Clostridium tertium, Clostridium thiosulfatireducens, Collinsella aerofaciens, Coprococcus comes, Coprococcus eutactus, Cronobacter condimenti, Cronobacter muytjensii, Cronobacter sakazakii, Dorea longicatena, Drancourtella massiliensis, Eggerthella lenta, Eisenbergiella massiliensis, Eisenbergiella tayi, Emergencia timonensis, Enterobacter asburiae, Enterobacter bugandensis, Enterobacter cloacae, Enterobacter hormaechei, Enterobacter tabaci, Erysipelatoclostridium ramosum, Escherichia albertii, Escherichia coli, Escherichia fergusonii, Escherichia marmotae, Eubacterium callanderi, Eubacterium limosum, Eubacterium maltosivorans, Eubacterium rectale, Eubacterium tenue, Faecalibacterium prausnitzii, Faecalicatena contorta, Faecalicatena fissicatena, Faecalicatena orotica, Flavonifractor plautii, Gemmiger formicilis, Harryflintia acetispora, Holdemania filiformis, Holdemania massiliensis, Intestinibacter bartlettii, Intestinimonas butyriciproducens, Kosakonia cowanii, Kosakonia oryzendophytica, Kosakonia oryziphila, Kosakonia pseudosacchari, Kosakonia sacchari, Lachnoclostridium pacaense, Lachnospira pectinoschiza, Lactobacillus fermentum, Lactobacillus gorillae, Lactonifactor longoviformis, Longibaculum muris, Longicatena caecimuris, Metakosakonia massiliensis, Mixta theicola, Murimonas intestina, Oscillibacter ruminantium, Paeniclostridium ghonii, Paeniclostridium sordellii, Pantoea beijingensis, Parabacteroides distasonis, Parabacteroides johnsonii, Parabacteroides merdae, Paraclostridium benzoelyticum, Paraclostridium bifermentans, Pectobacterium carotovorum, Peptostreptococcus anaerobius, Peptostreptococcus stomatis, Phytobacter ursingii, Pseudescherichia vulneris, Pseudocitrobacter anthropi, Pseudocitrobacter faecalis, Pseudoflavonifractor capillosus, Pseudoflavonifractor phocaeensis, Raoultella planticola, Robinsoniella peoriensis, Romboutsia ilealis, Romboutsia lituseburensis, Romboutsia sedimentorum, Romboutsia timonensis, Roseburia faecis, Roseburia hominis, Roseburia intestinalis, Roseburia inulinivorans, Ruminococcus albus, Ruminococcus bromii, Ruminococcus faecis, Ruminococcus gnavus, Ruminococcus lactaris, Ruminococcus torques, Ruthenibacterium lactatiformans, Salmonella bongori, Salmonella enterica, Sellimonas intestinalis, Shigella boydii, Shigella dysenteriae, Shigella flexneri, Shigella sonnei, Subdoligranulum variabile, Terrisporobacter glycolicus, Terrisporobacter mayombei, Terrisporobacter petrolearius, Trabulsiella odontotermitis, Turicibacter sanguinis, Tyzzerella nexilis, or Yokenella regensburgei. In some embodiments, a bacterial composition can comprise at least one, two, three, four, five, six, seven, eight, nine, ten, eleven, twelve, thirteen, fourteen, fifteen, sixteen, seventeen, eighteen, nineteen, twenty, twenty-five, thirty, thirty-five, forty, forty-five, fifty, or all of the species listed.

[0093] In some embodiments, a bacterial composition comprises bacteria having at least about 97%, e.g., at least 97%, at least about 97.5%, at least about 98%, at least about 98.5%, at least about 99%, identity to a 16S rDNA sequence (e.g., a full length or variable region of a 16S DNA sequence) to one or more of the following bacterial species: Agathobaculum desmolans, Akkermansia muciniphila, Alistipes finegoldii, Alistipes shahii, Anaerofustis stercorihominis, Anaeromassilibacillus senegalensis, Anaerostipes caccae, Anaerotruncus colihominis, Bacteroides caccae, Bacteroides eggerthii, Bacteroides faecis, Bacteroides intestinalis, Bacteroides koreensis, Bacteroides salyersiae, Bacteroides uniformis, Bacteroides vulgatus, Bacteroides xylanisolvens, Barnesiella intestinihominis, Bifidobacterium dentium, Bifidobacterium longum, Bifidobacterium stercoris, Blautia coccoides, Blautia hominis, Blautia hydrogenotrophica, Blautia luti, Blautia marasmi, Blautia obeum, Blautia producta, Blautia wexlerae, Butyricimonas faecihominis, Cellulosilyticum lentocellum, Clostridium aldenense, Clostridium asparagiforme, Clostridium bolteae, Clostridium butyricum, Clostridium citroniae, Clostridium clostridioforme, Clostridium cocleatum, Clostridium disporicum, Clostridium hylemonae, Clostridium innocuum, Clostridium lavalense, Clostridium scindens, Clostridium spiroforme, Clostridium subterminale, Clostridium symbiosum, Clostridium tertium, Collinsella aerofaciens, Coprococcus comes, Dorea longicatena, Drancourtella massiliensis, Eggerthella lenta, Eisenbergiella massiliensis, Eisenbergiella tayi, Emergencia timonensis, Erysipelatoclostridium ramosum, Eubacterium callanderi, Eubacterium limosum, Eubacterium maltosivorans, Eubacterium rectale, Faecalibacterium prausnitzii, Faecalicatena contorta, Faecalicatena fissicatena, Faecalicatena orotica, Flavonifractor plautii, Gemmiger formicilis, Harryflintia acetispora, Holdemania filiformis, Holdemania massiliensis, Intestinimonas butyriciproducens, Lachnoclostridium pacaense, Lactobacillus fermentum, Lactonifactor longoviformis, Longicatena caecimuris, Murimonas intestina, Oscillibacter ruminantium, Paeniclostridium sordellii, Parabacteroides distasonis, Parabacteroides merdae, Paraclostridium bifermentans, Peptostreptococcus stomatis, Pseudoflavonifractor capillosus, Pseudoflavonifractor phocaeensis, Robinsoniella peoriensis, Romboutsia timonensis, Roseburia intestinalis, Roseburia inulinivorans, Ruminococcus albus, Ruminococcus bromii, Ruminococcus faeces, Ruminococcus gnavus, Ruminococcus lactaris, Ruminococcus torques, Ruthenibacterium lactatiformans, Sellimonas intestinalis, Terrisporobacter mayombei, Terrisporobacter petrolearius, or Turicibacter sanguinis. In some embodiments, a bacterial composition can comprise at least one, two, three, four, five, six, seven, eight, nine, ten, eleven, twelve, thirteen, fourteen, fifteen, sixteen, seventeen, eighteen, nineteen, twenty, twenty-five, thirty, thirty-five, forty, forty-five, fifty, or all of the species listed.

[0094] In some embodiments, a bacterial composition comprises bacteria having at least about 97%, e.g., at least about 97%, at least about 97.5%, at least about 98%, at least about 98.5%, at least about 99%, identity to a 16S rDNA sequence (e.g., a full length or variable region of a 16S DNA sequence) to one or more of the following bacterial species: Agathobaculum desmolans, Akkermansia muciniphila, Alistipes finegoldii, Alistipes onderdonkii, Alistipes putredinis, Alistipes senegalensis, Alistipes shahii, Alistipes timonensis, Anaerofustis stercorihominis, Anaeromassilibacillus senegalensis, Anaerostipes caccae, Anaerotruncus colihominis, Bacteroides caccae, Bacteroides cellulosilyticus, Bacteroides eggerthii, Bacteroides faecichinchillae, Bacteroides faecis, Bacteroides finegoldii, Bacteroides intestinalis, Bacteroides koreensis, Bacteroides kribbi, Bacteroides oleiciplenus, Bacteroides ovatus, Bacteroides rodentium, Bacteroides salyersiae, Bacteroides stercorirosoris, Bacteroides thetaiotaomicron, Bacteroides uniformis, Bacteroides vulgatus, Bacteroides xylanisolvens, Barnesiella intestinihominis, Bifidobacterium adolescentis, Bifidobacterium catenulatum, Bifidobacterium dentium, Bifidobacterium faecale, Bifidobacterium kashiwanohense, Bifidobacterium longum, Bifidobacterium pseudocatenulatum, Bifidobacterium ruminantium, Bifidobacterium stercoris, Blautia coccoides, Blautia hansenii, Blautia hominis, Blautia hydrogenotrophica, Blautia luti, Blautia marasmi, Blautia obeum, Blautia producta, Blautia stercoris, Blautia wexlerae, Butyricimonas faecihominis, Cellulosilyticum lentocellum, Clostridium aldenense, Clostridium asparagiforme, Clostridium beijerinckii, Clostridium bolteae, Clostridium butyricum, Clostridium carnis, Clostridium celatum, Clostridium chauvoei, Clostridium chromiireducens, Clostridium citroniae, Clostridium clostridioforme, Clostridium cocleatum, Clostridium dakarense, Clostridium diolis, Clostridium disporicum, Clostridium hylemonae, Clostridium innocuum, Clostridium lavalense, Clostridium paraputrificum, Clostridium puniceum, Clostridium quinii, Clostridium saccharobutylicum, Clostridium saccharoperbutylacetonicum, Clostridium sartagoforme, Clostridium saudiense, Clostridium scindens, Clostridium septicum, Clostridium spiroforme, Clostridium subterminale, Clostridium sulfidigenes, Clostridium symbiosum, Clostridium tertium, Clostridium thiosulfatireducens, Collinsella aerofaciens, Coprococcus comes, Dorea longicatena, Drancourtella massiliensis, Eggerthella lenta, Eisenbergiella massiliensis, Eisenbergiella tayi, Emergencia timonensis, Erysipelatoclostridium ramosum, Eubacterium callanderi, Eubacterium limosum, Eubacterium maltosivorans, Eubacterium rectale, Eubacterium tenue, Faecalibacterium prausnitzii, Faecalicatena contorta, Faecalicatena fissicatena, Faecalicatena orotica, Flavonifractor plautii, Gemmiger formicilis, Harryflintia acetispora, Holdemania filiformis, Holdemania massiliensis, Intestinibacter bartlettii, Intestinimonas butyriciproducens, Lachnoclostridium pacaense, Lactobacillus fermentum, Lactobacillus gorillae, Lactonifactor longoviformis, Longicatena caecimuris, Murimonas intestini, Oscillibacter ruminantium, Paeniclostridium ghonii, Paeniclostridium sordellii, Parabacteroides distasonis, Parabacteroides johnsonii, Parabacteroides merdae, Paraclostridium benzoelyticum, Paraclostridium bifermentans, Peptostreptococcus anaerobius, Peptostreptococcus stomatis, Pseudoflavonifractor capillosus, Pseudoflavonifractor phocaeensis, Robinsoniella peoriensis, Romboutsia ilealis, Romboutsia lituseburensis, Romboutsia sedimentorum, Romboutsia timonensis, Roseburia faecis, Roseburia hominis, Roseburia intestinalis, Roseburia inulinivorans, Ruminococcus albus, Ruminococcus bromii, Ruminococcus faecis, Ruminococcus gnavus, Ruminococcus lactaris, Ruminococcus torques, Ruthenibacterium lactatiformans, Sellimonas intestinalis, Subdoligranulum variabile, Terrisporobacter glycolicus, Terrisporobacter mayombei, Terrisporobacter petrolearius, or Turicibacter sanguinis. In some embodiments, a bacterial composition can comprise at least one, two, three, four, five, six, seven, eight, nine, ten, eleven, twelve, thirteen, fourteen, fifteen, sixteen, seventeen, eighteen, nineteen, twenty, twenty-five, thirty, thirty-five, forty, forty-five, fifty, or all of the species listed.

[0095] In some embodiments, a bacterial composition comprises one or more of the following bacterial species: Eubacterium maltosivorans, Clostridium aldenense, Clostridium bolteae, Clostridium glycyrrhizinilyticum, Clostridium hylemonae, Clostridium innocuum, Clostridium lavalense, Clostridium scindens, Clostridium spiroforme, Clostridium symbiosum, Eubacterium rectale, Ruminococcus gnavus, Ruminococcus torques, Absiella dolichum, Agathobaculum desmolans, Akkermansia muciniphila, Alistipes finegoldii, Alistipes shahii, Anaerofustis stercorihominis, Anaeromassilibacillus senegalensis, Anaerostipes caccae, Anaerotruncus colihominis, Bacteroides caccae, Faecalibacterium prausnitzii, Faecalicatena contorta, Faecalicatena orotica, Flavonifractor plautii, Gemmiger formicilis, Harryflintia acetispora, Holdemania filiformis, Holdemania massiliensis, Intestinimonas butyriciproducens, Lachnospira pectinoschiza, Lachnospiraceae bacterium 5 1 57FAA, Lactobacillus fermentum, Lactonifactor longoviformis, Longibaculum muris, Longicatena caecimuris, Murimonas intestini, Oscillibacter ruminantium, Bacteroides eggerthii, Bacteroides faecis, Bacteroides intestinalis, Bacteroides koreensis, Bacteroides kribbi, Bacteroides salyersiae, Bacteroides uniformis, Bacteroides vulgatus, Bacteroides xylanisolvens, Barnesiella intestinihominis, Bifidobacterium dentium, Bifidobacterium longum, Bifidobacterium stercoris, Blautia coccoides, Blautia hominis, Blautia hydrogenotrophica, Blautia luti, Blautia obeum, Blautia producta, Blautia wexlerae, Butyricimonas faecihominis, Cellulosilyticum lentocellum, Clostridium butyricum, Ruthenibacterium lactatiformans, Sellimonas intestinalis, Shigella flexneri, Terrisporobacter mayombei, Terrisporobacter petrolearius, Turicibacter sanguinis, Tyzzerella nexilis, Clostridium disporicum, Clostridium subterminale, Clostridium tertium, Collinsella aerofaciens, Coprococcus comes, Coprococcus eutactus, Dorea longicatena, Drancourtella massiliensis, Eggerthella lenta, Eisenbergiella tayi, Emergencia timonensis, Erysipelatoclostridium ramosum, Eubacterium callanderi, Paeniclostridium sordellii, Parabacteroides distasonis, Parabacteroides merdae, Paraclostridium bifermentans, Peptostreptococcus stomatis, Robinsoniella peoriensis, Romboutsia timonensis, Roseburia intestinalis, Roseburia inulinivorans, Ruminococcus albus, Ruminococcus bromii, Ruminococcus faecis, or Ruminococcus lactaris. In some embodiments, a bacterial composition can comprise at least one, two, three, four, five, six, seven, eight, nine, ten, eleven, twelve, thirteen, fourteen, fifteen, sixteen, seventeen, eighteen, nineteen, twenty, twenty-five, thirty, thirty-five, forty, forty-five, fifty, or all of the species listed.

[0096] In some embodiments, a bacterial composition comprises one or more of the following bacterial species: Absiella dolichum, Agathobaculum desmolans, Akkermansia muciniphila, Alistipes finegoldii, Alistipes onderdonkii, Alistipes putredinis, Alistipes senegalensis, Alistipes shahii, Alistipes timonensis, Anaerofustis stercorihominis, Anaeromassilibacillus senegalensis, Anaerostipes caccae, Anaerotruncus colihominis, Atlantibacter hermannii, Atlantibacter subterranea, Bacteroides caccae, Bacteroides cellulosilyticus, Bacteroides eggerthii, Bacteroides faecichinchillae, Bacteroides faecis, Bacteroides finegoldii, Bacteroides intestinalis, Bacteroides koreensis, Bacteroides kribbi, Bacteroides oleiciplenus, Bacteroides ovatus, Bacteroides rodentium, Bacteroides salyersiae, Bacteroides stercorirosoris, Bacteroides thetaiotaomicron, Bacteroides uniformis, Bacteroides vulgatus, Bacteroides xylanisolvens, Barnesiella intestinihominis, Bifidobacterium adolescentis, Bifidobacterium catenulatum, Bifidobacterium dentium, Bifidobacterium faecale, Bifidobacterium kashiwanohense, Bifidobacterium longum, Bifidobacterium pseudocatenulatum, Bifidobacterium ruminantium, Bifidobacterium stercoris, Blautia coccoides, Blautia hansenii, Blautia hominis, Blautia hydrogenotrophica, Blautia luti, Blautia marasmi, Blautia obeum, Blautia producta, Blautia stercoris, Blautia wexlerae, Brenneria alni, Butyricimonas faecihominis, Cedecea lapagei, Cellulosilyticum lentocellum, Citrobacter amalonaticus, Citrobacter farmeri, Citrobacter koseri, Citrobacter sedlakii, Citrobacter youngae, Clostridium aldenense, Clostridium asparagiforme, Clostridium beijerinckii, Clostridium bolteae, Clostridium butyricum, Clostridium earths, Clostridium celatum, Clostridium chauvoei, Clostridium chromiireducens, Clostridium citroniae, Clostridium clostridioforme, Clostridium cocleatum, Clostridium dakarense, Clostridium diolis, Clostridium disporicum, Clostridium glycyrrhizinilyticum, Clostridium hylemonae, Clostridium innocuum, Clostridium lavalense, Clostridium paraputrificum, Clostridium puniceum, Clostridium quinii, Clostridium saccharobutylicum, Clostridium saccharoperbutylacetonicum, Clostridium sartagoforme, Clostridium saudiense, Clostridium scindens, Clostridium septicum, Clostridium spiroforme, Clostridium subterminale, Clostridium sulfidigenes, Clostridium symbiosum, Clostridium tertium, Clostridium thiosulfatireducens, Collinsella aerofaciens, Coprococcus comes, Coprococcus eutactus, Cronobacter condimenti, Cronobacter muytjensii, Cronobacter sakazakii, Dorea longicatena, Drancourtella massiliensis, Eggerthella lenta, Eisenbergiella massiliensis, Eisenbergiella tayi, Emergencia timonensis, Enterobacter asburiae, Enterobacter bugandensis, Enterobacter cloacae, Enterobacter hormaechei, Enterobacter tabaci, Erysipelatoclostridium ramosum, Escherichia albertii, Escherichia coli, Escherichia fergusonii, Escherichia marmotae, Eubacterium callanderi, Eubacterium limosum, Eubacterium maltosivorans, Eubacterium rectale, Eubacterium tenue, Faecalibacterium prausnitzii, Faecalicatena contorta, Faecalicatena fissicatena, Faecalicatena orotica, Flavonifractor plautii, Gemmiger formicilis, Harryflintia acetispora, Holdemania filiformis, Holdemania massiliensis, Intestinibacter bartlettii, Intestinimonas butyriciproducens, Kosakonia cowanii, Kosakonia oryzendophytica, Kosakonia oryziphila, Kosakonia pseudosacchari, Kosakonia sacchari, Lachnoclostridium pacaense, Lachnospira pectinoschiza, Lactobacillus fermentum, Lactobacillus gorillae, Lactonifactor longoviformis, Longibaculum muris, Longicatena caecimuris, Metakosakonia massiliensis, Mixta theicola, Murimonas intestini, Oscillibacter ruminantium, Paeniclostridium ghonii, Paeniclostridium sordellii, Pantoea beijingensis, Parabacteroides distasonis, Parabacteroides johnsonii, Parabacteroides merdae, Paraclostridium benzoelyticum, Paraclostridium bifermentans, Pectobacterium carotovorum, Peptostreptococcus anaerobius, Peptostreptococcus stomatis, Phytobacter ursingii, Pseudescherichia vulneris, Pseudocitrobacter anthropi, Pseudocitrobacter faecalis, Pseudoflavonifractor capillosus, Pseudoflavonifractor phocaeensis, Raoultella planticola, Robinsoniella peoriensis, Romboutsia ilealis, Romboutsia lituseburensis, Romboutsia sedimentorum, Romboutsia timonensis, Roseburia faecis, Roseburia hominis, Roseburia intestinalis, Roseburia inulinivorans, Ruminococcus albus, Ruminococcus bromii, Ruminococcus faecis, Ruminococcus gnavus, Ruminococcus lactaris, Ruminococcus torques, Ruthenibacterium lactatiformans, Salmonella bongori, Salmonella enterica, Sellimonas intestinalis, Shigella boydii, Shigella dysenteriae, Shigella flexneri, Shigella sonnei, Subdoligranulum variabile, Terrisporobacter glycolicus, Terrisporobacter mayombei, Terrisporobacter petrolearius, Trabulsiella odontotermitis, Turicibacter sanguinis, Tyzzerella nexilis, or Yokenella regensburgei. In some embodiments, a bacterial composition can comprise at least one, two, three, four, five, six, seven, eight, nine, ten, eleven, twelve, thirteen, fourteen, fifteen, sixteen, seventeen, eighteen, nineteen, twenty, twenty-five, thirty, thirty-five, forty, forty-five, fifty, or all of the species listed.

[0097] In some embodiments, a bacterial composition comprises one or more of the following bacterial species: Agathobaculum desmolans, Akkermansia muciniphila, Alistipes finegoldii, Alistipes shahii, Anaerofustis stercorihominis, Anaeromassilibacillus senegalensis, Anaerostipes caccae, Anaerotruncus colihominis, Bacteroides caccae, Bacteroides eggerthii, Bacteroides faecis, Bacteroides intestinalis, Bacteroides koreensis, Bacteroides salyersiae, Bacteroides uniformis, Bacteroides vulgatus, Bacteroides xylanisolvens, Barnesiella intestinihominis, Bifidobacterium dentium, Bifidobacterium longum, Bifidobacterium stercoris, Blautia coccoides, Blautia hominis, Blautia hydrogenotrophica, Blautia luti, Blautia marasmi, Blautia obeum, Blautia producta, Blautia wexlerae, Butyricimonas faecihominis, Cellulosilyticum lentocellum, Clostridium aldenense, Clostridium asparagiforme, Clostridium bolteae, Clostridium butyricum, Clostridium citroniae, Clostridium clostridioforme, Clostridium cocleatum, Clostridium disporicum, Clostridium hylemonae, Clostridium innocuum, Clostridium lavalense, Clostridium scindens, Clostridium spiroforme, Clostridium subterminale, Clostridium symbiosum, Clostridium tertium, Collinsella aerofaciens, Coprococcus comes, Dorea longicatena, Drancourtella massiliensis, Eggerthella lenta, Eisenbergiella massiliensis, Eisenbergiella tayi, Emergencia timonensis, Erysipelatoclostridium ramosum, Eubacterium callanderi, Eubacterium limosum, Eubacterium maltosivorans, Eubacterium rectale, Faecalibacterium prausnitzii, Faecalicatena contorta, Faecalicatena fissicatena, Faecalicatena orotica, Flavonifractor plautii, Gemmiger formicilis, Harryflintia acetispora, Holdemania filiformis, Holdemania massiliensis, Intestinimonas butyriciproducens, Lachnoclostridium pacaense, Lactobacillus fermentum, Lactonifactor longoviformis, Longicatena caecimuris, Murimonas intestini, Oscillibacter ruminantium, Paeniclostridium sordellii, Parabacteroides distasonis, Parabacteroides merdae, Paraclostridium bifermentans, Peptostreptococcus stomatis, Pseudoflavonifractor capillosus, Pseudoflavonifractor phocaeensis, Robinsoniella peoriensis, Romboutsia timonensis, Roseburia intestinalis, Roseburia inulinivorans, Ruminococcus albus, Ruminococcus bromii, Ruminococcus faecis, Ruminococcus gnavus, Ruminococcus lactaris, Ruminococcus torques, Ruthenibacterium lactatiformans, Sellimonas intestinalis, Terrisporobacter mayombei, Terrisporobacter petrolearius, or Turicibacter sanguinis. In some embodiments, a bacterial composition can comprise at least one, two, three, four, five, six, seven, eight, nine, ten, eleven, twelve, thirteen, fourteen, fifteen, sixteen, seventeen, eighteen, nineteen, twenty, twenty-five, thirty, thirty-five, forty, forty-five, fifty, or all of the species listed.

[0098] In some embodiments, a bacterial composition comprises one or more of the following bacterial species: Agathobaculum desmolans, Akkermansia muciniphila, Alistipes finegoldii, Alistipes onderdonkii, Alistipes putredinis, Alistipes senegalensis, Alistipes shahii, Alistipes timonensis, Anaerofustis stercorihominis, Anaeromassilibacillus senegalensis, Anaerostipes caccae, Anaerotruncus colihominis, Bacteroides caccae, Bacteroides cellulosilyticus, Bacteroides eggerthii, Bacteroides faecichinchillae, Bacteroides faecis, Bacteroides finegoldii, Bacteroides intestinalis, Bacteroides koreensis, Bacteroides kribbi, Bacteroides oleiciplenus, Bacteroides ovatus, Bacteroides rodentium, Bacteroides salyersiae, Bacteroides stercorirosoris, Bacteroides thetaiotaomicron, Bacteroides uniformis, Bacteroides vulgatus, Bacteroides xylanisolvens, Barnesiella intestinihominis, Bifidobacterium adolescentis, Bifidobacterium catenulatum, Bifidobacterium dentium, Bifidobacterium faecale, Bifidobacterium kashiwanohense, Bifidobacterium longum, Bifidobacterium pseudocatenulatum, Bifidobacterium ruminantium, Bifidobacterium stercoris, Blautia coccoides, Blautia hansenii, Blautia hominis, Blautia hydrogenotrophica, Blautia luti, Blautia marasmi, Blautia obeum, Blautia producta, Blautia stercoris, Blautia wexlerae, Butyricimonas faecihominis, Cellulosilyticum lentocellum, Clostridium aldenense, Clostridium asparagiforme, Clostridium beijerinckii, Clostridium bolteae, Clostridium butyricum, Clostridium earths, Clostridium celatum, Clostridium chauvoei, Clostridium chromiireducens, Clostridium citroniae, Clostridium clostridioforme, Clostridium cocleatum, Clostridium dakarense, Clostridium diolis, Clostridium disporicum, Clostridium hylemonae, Clostridium innocuum, Clostridium lavalense, Clostridium paraputrificum, Clostridium puniceum, Clostridium quinii, Clostridium saccharobutylicum, Clostridium saccharoperbutylacetonicum, Clostridium sartagoforme, Clostridium saudiense, Clostridium scindens, Clostridium septicum, Clostridium spiroforme, Clostridium subterminale, Clostridium sulfidigenes, Clostridium symbiosum, Clostridium tertium, Clostridium thiosulfatireducens, Collinsella aerofaciens, Coprococcus comes, Dorea longicatena, Drancourtella massiliensis, Eggerthella lenta, Eisenbergiella massiliensis, Eisenbergiella tayi, Emergencia timonensis, Erysipelatoclostridium ramosum, Eubacterium callanderi, Eubacterium limosum, Eubacterium maltosivorans, Eubacterium rectale, Eubacterium tenue, Faecalibacterium prausnitzii, Faecalicatena contorta, Faecalicatena fissicatena, Faecalicatena orotica, Flavonifractor plautii, Gemmiger formicilis, Harryflintia acetispora, Holdemania filiformis, Holdemania massiliensis, Intestinibacter bartlettii, Intestinimonas butyriciproducens, Lachnoclostridium pacaense, Lactobacillus fermentum, Lactobacillus gorillae, Lactonifactor longoviformis, Longicatena caecimuris, Murimonas intestini, Oscillibacter ruminantium, Paeniclostridium ghonii, Paeniclostridium sordellii, Parabacteroides distasonis, Parabacteroides johnsonii, Parabacteroides merdae, Paraclostridium benzoelyticum, Paraclostridium bifermentans, Peptostreptococcus anaerobius, Peptostreptococcus stomatis, Pseudoflavonifractor capillosus, Pseudoflavonifractor phocaeensis, Robinsoniella peoriensis, Romboutsia ilealis, Romboutsia lituseburensis, Romboutsia sedimentorum, Romboutsia timonensis, Roseburia faecis, Roseburia hominis, Roseburia intestinalis, Roseburia inulinivorans, Ruminococcus albus, Ruminococcus bromii, Ruminococcus faecis, Ruminococcus gnavus, Ruminococcus lactaris, Ruminococcus torques, Ruthenibacterium lactatiformans, Sellimonas intestinalis, Subdoligranulum variabile, Terrisporobacter glycolicus, Terrisporobacter mayombei, Terrisporobacter petrolearius, or Turicibacter sanguinis. In some embodiments, a bacterial composition can comprise at least one, two, three, four, five, six, seven, eight, nine, ten, eleven, twelve, thirteen, fourteen, fifteen, sixteen, seventeen, eighteen, nineteen, twenty, twenty-five, thirty, thirty-five, forty, forty-five, fifty, or all of the species listed.

[0099] In some embodiments, a bacterial composition comprises one or more of the following bacterial species: Anaerotruncus colihominis, Blautia producta, Blautia wexlerae, Clostridium aldenense, Clostridium bolteae, Clostridium innocuum, Faecalicatena orotica, Erysipelatoclostridium ramosum, Eisenbergiella tayi, Emergencia timonensis, Eubacterium maltosivorans, Flavonifractor plautii, Murimonas intestini, Blautia obeum, Dorea longicatena, Clostridium scindens. In some embodiments, one or more of the bacteria in a composition has at least about 97% identity, e.g., at least about 97%, at least about 97.5%, at least about 98%, at least about 98.5%, at least 99% identity, to a 16S rDNA of the foregoing species. In some embodiments, a bacterial composition can comprise at least one, two, three, four, five, six, seven, eight, nine, ten, eleven, twelve, thirteen, fourteen, fifteen, or all of the bacterial species listed.

[0100] In some embodiments, a bacterial composition comprises one or more of the following bacterial species: Anaerotruncus colihominis, Blautia coccoides, Blautia hominis, Blautia luti, Blautia marasmi, Blautia obeum, Blautia producta, Blautia stercorin, Blautia wexlerae, Clostridium aldenense, Clostridium bolteae, Clostridium innocuum, Dorea longicatena, Eisenbergiella massiliensis, Eisenbergiella tayi, Emergencia timonensis, Erysipelatoclostridium ramosum, Eubacterium callanderi, Eubacterium limosum, Faecalicatena contorta, Faecalicatena fissicatena, Faecalicatena orotica, Flavonifractor plautii, Murimonas intestini, or Pseudoflavonifractor phocaeensis. In some embodiments, one or more of the bacteria in a composition has at least about 97% identity, e.g., at least about 97%, at least about 97.5%, at least about 98%, at least about 98.5%, at least about 99% identity, to a 16S rDNA of the foregoing species. In some embodiments, a bacterial composition can comprise at least one, two, three, four, five, six, seven, eight, nine, ten, eleven, twelve, thirteen, fourteen, fifteen, or all of the bacterial species listed.

[0101] In some embodiments, a bacterial composition comprises one or more of the following bacterial species: Anaerotruncus colihominis, Blautia coccoides, Blautia hominis, Blautia luti, Blautia marasmi, Blautia obeum, Blautia producta, Blautia stercoris, Blautia wexlerae, Clostridium aldenense, Clostridium bolteae, Clostridium innocuum, Clostridium scindens, Dorea longicatena, Eisenbergiella massiliensis, Eisenbergiella tayi, Emergencia timonensis, Erysipelatoclostridium ramosum, Eubacterium callanderi, Eubacterium limosum, Faecalicatena contorta, Faecalicatena fissicatena, Faecalicatena orotica, Flavonifractor plautii, Murimonas intestini, or Pseudoflavonifractor phocaeensis. In some embodiments, one or more of the bacteria in a composition has at least about 97% identity, e.g., at least about 97%, at least about 97.5%, at least about 98%, at least about 98.5%, at least about 99% identity, to a 16S rDNA of the foregoing species. In some embodiments, a bacterial composition can comprise at least one, two, three, four, five, six, seven, eight, nine, ten, eleven, twelve, thirteen, fourteen, fifteen, or all of the bacterial species listed.

[0102] In some embodiments, a bacterial composition comprises one or more of the following bacterial species: Bacteroides salyersiae, Bacteroides vulgatus, Bifidobacterium longum, Blautia obeum, Clostridium asparagiforme, Clostridium bolteae, Clostridium innocuum, Clostridium lavalense, Clostridium scindens, Dorea longicatena, Emergencia timonensis, Faecalicatena orotica, Gemmiger formicilis, Intestinibacter bartlettii, Intestinimonas butyriciproducens, Romboutsia ilealis, Romboutsia timonensis, Roseburia faecis, Roseburia hominis, Roseburia intestinalis, Ruminococcus faecis, Subdoligranulum variabile, Terrisporobacter glycolicus, Terrisporobacter mayombei, or Terrisporobacter petrolearius. In some embodiments, one or more of the bacteria in a composition has at least about 97% identity, e.g., at least about 97%, at least about 97.5%, at least about 98%, at least about 98.5%, at least about 99% identity, to a 16S rDNA of the foregoing species. In some embodiments, a bacterial composition can comprise at least one, two, three, four, five, six, seven, eight, nine, ten, eleven, twelve, thirteen, fourteen, fifteen, or all of the bacterial species listed.

[0103] In some embodiments, a bacterial composition comprises one or more of the following bacterial species: Agathobaculum desmolans, Akkermansia muciniphila, Alistipes finegoldii, Alistipes onderdonkii, Alistipes putredinis, Alistipes senegalensis, Alistipes shahii, Alistipes timonensis, Anaerotruncus colihominis, Bacteroides caccae, Bacteroides cellulosilyticus, Bacteroides faecis, Bacteroides finegoldii, Bacteroides intestinalis, Bacteroides oleiciplenus, Bacteroides stercorirosoris, Bacteroides thetaiotaomicron, Bifidobacterium adolescentis, Bifidobacterium catenulatum, Bifidobacterium dentium, Bifidobacterium faecale, Bifidobacterium kashiwanohense, Bifidobacterium longum, Bifidobacterium pseudocatenulatum, Bifidobacterium ruminantium, Bifidobacterium stercoris, Blautia coccoides, Blautia hominis, Blautia marasmi, Blautia producta, Blautia stercoris, Clostridium aldenense, Clostridium subterminale, Clostridium sulfidigenes, Clostridium thiosulfatireducens, Emergencia timonensis, Faecalibacterium prausnitzii, Intestinibacter bartlettii, Intestinimonas butyriciproducens, Roseburia faecis, Roseburia hominis, Roseburia intestinalis, Terrisporobacter glycolicus, Terrisporobacter mayombei, or Terrisporobacter petrolearius. In some embodiments, one or more of the bacteria in a composition has at least about 97% identity, e.g., at least about 97%, at least about 97.5%, at least about 98%, at least about 98.5%, at least about 99% identity, to a 16S rDNA of the foregoing species. In some embodiments, a bacterial composition can comprise at least one, two, three, four, five, six, seven, eight, nine, ten, eleven, twelve, thirteen, fourteen, fifteen, or all of the bacterial species listed.

[0104] In some embodiments, a bacterial composition comprises one or more of the following bacterial species: Anaerotruncus colihominis, Blautia coccoides, Blautia hominis, Blautia marasmi, Blautia obeum, Blautia producta, Blautia stercoris, Clostridium aldenense, Clostridium bolteae, Clostridium innocuum, Dorea longicatena, Eisenbergiella massiliensis, Eisenbergiella tayi, Emergencia timonensis, Erysipelatoclostridium ramosum, Faecalicatena contorta, Faecalicatena fissicatena, Faecalicatena orotica, Flavonifractor plautii, Murimonas intestini, or Pseudoflavonifractor phocaeensis. In some embodiments, one or more of the bacteria in a composition has at least about 97% identity, e.g., at least about 97%, at least about 97.5%, at least about 98%, at least about 98.5%, at least about 99% identity, to a 16S rDNA of the foregoing species. In some embodiments, a bacterial composition can comprise at least one, two, three, four, five, six, seven, eight, nine, ten, eleven, twelve, thirteen, fourteen, fifteen, or all of the bacterial species listed.

[0105] In some embodiments, a bacterial composition comprises one or more of the following bacterial species: Anaerotruncus colihominis, Blautia hominis, Blautia luti, Blautia obeum, Clostridium aldenense, Clostridium bolteae, Clostridium innocuum, Dorea longicatena, Eisenbergiella tayi, Emergencia timonensis, Erysipelatoclostridium ramosum, Eubacterium callanderi, Faecalicatena orotica, Flavonifractor plautii, or Murimonas intestini. In some embodiments, one or more of the bacteria in a composition has at least about 97% identity, e.g., at least about 97%, at least about 97.5%, at least about 98%, at least about 98.5%, at least about 99% identity, to a 16S rDNA of the foregoing species. In some embodiments, a bacterial composition can comprise at least one, two, three, four, five, six, seven, eight, nine, ten, eleven, twelve, thirteen, fourteen, fifteen, or all of the bacterial species listed.

[0106] In some embodiments, a bacterial composition comprises one or more of the following bacterial species: Anaerotruncus colihominis, Blautia hominis, Blautia obeum, Blautia wexlerae, Clostridium aldenense, Clostridium bolteae, Clostridium innocuum, Clostridium scindens, Dorea longicatena, Eisenbergiella tayi, Emergencia timonensis, Erysipelatoclostridium ramosum, Eubacterium callanderi, Faecalicatena orotica, Flavonifractor plautii, or Murimonas intestini. In some embodiments, one or more of the bacteria in a composition has at least about 97% identity, e.g., at least about 97%, at least about 97.5%, at least about 98%, at least about 98.5%, at least about 99% identity, to a 16S rDNA of the foregoing species. In some embodiments, a bacterial composition can comprise at least one, two, three, four, five, six, seven, eight, nine, ten, eleven, twelve, thirteen, fourteen, fifteen, or all of the bacterial species listed.

[0107] In some embodiments, a bacterial composition comprises one or more of the following bacterial species: Bacteroides salyersiae, Bacteroides vulgatus, Bifidobacterium longum, Blautia obeum, Clostridium innocuum, Clostridium lavalense, Clostridium scindens, Dorea longicatena, Emergencia timonensis, Faecalicatena orotica, Gemmiger formicilis, Intestinimonas butyriciproducens, Roseburia intestinalis, Ruminococcus faecis, Terrisporobacter mayombei, or Terrisporobacter petrolearius. In some embodiments, one or more of the bacteria in a composition has at least about 97% identity, e.g., at least about 97%, at least about 97.5%, at least about 98%, at least about 98.5%, at least about 99% identity, to a 16S rDNA of the foregoing species. In some embodiments, a bacterial composition can comprise at least one, two, three, four, five, six, seven, eight, nine, ten, eleven, twelve, thirteen, fourteen, fifteen, or all of the bacterial species listed.

[0108] In some embodiments, a bacterial composition comprises one or more of the following bacterial species: Agathobaculum desmolans, Akkermansia muciniphila, Alistipes finegoldii, Anaerotruncus colihominis, Bacteroides caccae, Bacteroides faecis, Bacteroides intestinalis, Bifidobacterium longum, Bifidobacterium stercoris, Blautia hominis, Clostridium aldenense, Clostridium subterminale, Emergencia timonensis, Faecalibacterium prausnitzii, Intestinimonas butyriciproducens, Roseburia intestinalis, Terrisporobacter mayombei, or Terrisporobacter petrolearius. In some embodiments, one or more of the bacteria in a composition has at least about 97% identity, e.g., at least about 97%, at least about 97.5%, at least about 98%, at least about 98.5%, at least about 99% identity, to a 16S rDNA of the foregoing species. In some embodiments, a bacterial composition can comprise at least one, two, three, four, five, six, seven, eight, nine, ten, eleven, twelve, thirteen, fourteen, fifteen, or all of the bacterial species listed.

[0109] In some embodiments, a bacterial composition comprises one or more of the following bacterial species: Anaerotruncus colihominis, Blautia hominis, Blautia obeum, Clostridium aldenense, Clostridium bolteae, Clostridium innocuum, Dorea longicatena, Eisenbergiella tayi, Emergencia timonensis, Erysipelatoclostridium ramosum, Faecalicatena orotica, Flavonifractor plautii, or Murimonas intestini. In some embodiments, one or more of the bacteria in a composition has at least about 97% identity, e.g., at least about 97%, at least about 97.5%, at least about 98%, at least about 98.5%, at least about 99% identity, to a 16S rDNA of the foregoing species. In some embodiments, a bacterial composition can comprise at least one, two, three, four, five, six, seven, eight, nine, ten, eleven, twelve, thirteen, fourteen, fifteen, or all of the bacterial species listed.

[0110] In some embodiments, a bacterial composition comprises one or more of the following bacterial species: Anaerotruncus colihominis, Blautia hominis, Blautia obeum, Clostridium aldenense, Clostridium bolteae, Clostridium innocuum, Dorea longicatena, Eisenbergiella tayi, Emergencia timonensis, Erysipelatoclostridium ramosum, Faecalicatena orotica, Flavonifractor plautii, or Murimonas intestini. In some embodiments, one or more of the bacteria in a composition has at least about 97% identity, e.g., at least about 97%, at least about 97.5%, at least about 98%, at least about 98.5%, at least about 99% identity, to a 16S rDNA of the foregoing species. In some embodiments, a bacterial composition can comprise at least one, two, three, four, five, six, seven, eight, nine, ten, eleven, twelve, thirteen, fourteen, fifteen, or all of the bacterial species listed.

[0111] In some embodiments, a bacterial composition comprises one or more of the following bacterial species: Anaerotruncus colihominis, Blautia coccoides, Blautia hominis, Blautia luti, Blautia marasmi, Blautia producta, Blautia stercoris, Blautia wexlerae, Clostridium aldenense, Clostridium bolteae, Clostridium innocuum, Eisenbergiella massiliensis, Eisenbergiella tayi, Emergencia timonensis, Erysipelatoclostridium ramosum, Eubacterium callanderi, Eubacterium limosum, Faecalicatena contorta, Faecalicatena fissicatena, Faecalicatena orotica, Flavonifractor plautii, Murimonas intestini, or Pseudoflavonifractor phocaeensis. In some embodiments, one or more of the bacteria in a composition has at least about 97% identity, e.g., at least about 97%, at least about 97.5%, at least about 98%, at least about 98.5%, at least about 99% identity, to a 16S rDNA of the foregoing species. In some embodiments, a bacterial composition can comprise at least one, two, three, four, five, six, seven, eight, nine, ten, eleven, twelve, thirteen, fourteen, fifteen, or all of the bacterial species listed.

[0112] In some embodiments, a bacterial composition comprises one or more of the following bacterial species: Anaerotruncus colihominis, Blautia coccoides, Blautia hominis, Blautia luti, Blautia marasmi, Blautia obeum, Blautia producta, Blautia stercoris, Blautia wexlerae, Clostridium aldenense, Clostridium bolteae, Clostridium innocuum, Dorea longicatena, Eisenbergiella massiliensis, Eisenbergiella tayi, Emergencia timonensis, Erysipelatoclostridium ramosum, Eubacterium callanderi, Eubacterium limosum, Faecalicatena contorta, Faecalicatena fissicatena, Faecalicatena orotica, Flavonifractor plautii, Murimonas intestini, or Pseudoflavonifractor phocaeensis. In some embodiments, one or more of the bacteria in a composition has at least about 97% identity, e.g., at least about 97%, at least about 97.5%, at least about 98%, at least about 98.5%, at least about 99% identity, to a 16S rDNA of the foregoing species. In some embodiments, a bacterial composition can comprise at least one, two, three, four, five, six, seven, eight, nine, ten, eleven, twelve, thirteen, fourteen, fifteen, or all of the bacterial species listed.

[0113] In some embodiments, a bacterial composition comprises one or more of the following bacterial species: Anaerotruncus colihominis, Blautia coccoides, Blautia hominis, Blautia luti, Blautia marasmi, Blautia obeum, Blautia producta, Blautia stercoris, Blautia wexlerae, Clostridium aldenense, Clostridium bolteae, Clostridium innocuum, Dorea longicatena, Eisenbergiella massiliensis, Eisenbergiella tayi, Emergencia timonensis, Erysipelatoclostridium ramosum, Eubacterium callanderi, Eubacterium limosum, Faecalicatena contorta, Faecalicatena fissicatena, Faecalicatena orotica, Flavonifractor plautii, Murimonas intestini, Pseudoflavonifractor phocaeensis. In some embodiments, one or more of the bacteria in a composition has at least about 97% identity, e.g., at least about 97%, at least about 97.5%, at least about 98%, at least about 98.5%, at least about 99% identity, to a 16S rDNA of the foregoing species. In some embodiments, a bacterial composition can comprise at least one, two, three, four, five, six, seven, eight, nine, ten, eleven, twelve, thirteen, fourteen, fifteen, or all of the bacterial species listed.

[0114] In some embodiments, a bacterial composition comprises one or more of the following bacterial species: Agathobaculum desmolans, Anaerotruncus colihominis, Blautia hominis, Blautia wexlerae, Clostridium aldenense, Clostridium bolteae, Clostridium innocuum, Eisenbergiella tayi, Emergencia timonensis, Erysipelatoclostridium ramosum, Eubacterium callanderi, Faecalicatena orotica, Flavonifractor plautii, Murimonas intestini, Roseburia intestinalis, Terrisporobacter mayombei, or Terrisporobacter petrolearius. In some embodiments, one or more of the bacteria in a composition has at least about 97% identity, e.g., at least about 97%, at least about 97.5%, at least about 98%, at least about 98.5%, at least about 99% identity, to a 16S rDNA of the foregoing species. In some embodiments, a bacterial composition can comprise at least one, two, three, four, five, six, seven, eight, nine, ten, eleven, twelve, thirteen, fourteen, fifteen, or all of the bacterial species listed.

[0115] In some embodiments, a bacterial composition comprises one or more of the following bacterial species: Anaerotruncus colihominis, Blautia hominis, Blautia wexlerae, Clostridium aldenense, Clostridium bolteae, Clostridium innocuum, Eisenbergiella tayi, Emergencia timonensis, Erysipelatoclostridium ramosum, Eubacterium callanderi, Faecalicatena orotica, Flavonifractor plautii, or Murimonas intestini. In some embodiments, one or more of the bacteria in a composition has at least about 97% identity, e.g., at least about 97%, at least about 97.5%, at least about 98%, at least about 98.5%, at least about 99% identity, to a 16S rDNA of the foregoing species. In some embodiments, a bacterial composition can comprise at least one, two, three, four, five, six, seven, eight, nine, ten, eleven, twelve, thirteen, fourteen, fifteen, or all of the bacterial species listed.

[0116] In some embodiments, a bacterial composition comprises one or more of the following bacterial species: Anaerotruncus colihominis, Blautia hominis, Blautia obeum, Blautia wexlerae, Clostridium aldenense, Clostridium bolteae, Clostridium innocuum, Dorea longicatena, Eisenbergiella tayi, Emergencia timonensis, Erysipelatoclostridium ramosum, Eubacterium callanderi, Faecalicatena orotica, Flavonifractor plautii, or Murimonas intestini. In some embodiments, one or more of the bacteria in a composition has at least about 97% identity, e.g., at least about 97%, at least about 97.5%, at least about 98%, at least about 98.5%, at least about 99% identity, to a 16S rDNA of the foregoing species. In some embodiments, a bacterial composition can comprise at least one, two, three, four, five, six, seven, eight, nine, ten, eleven, twelve, thirteen, fourteen, fifteen, or all of the bacterial species listed.

[0117] In some embodiments, a bacterial composition comprises one or more of the following bacterial species: Anaerotruncus colihominis, Blautia hominis, Blautia obeum, Blautia wexlerae, Clostridium aldenense, Clostridium bolteae, Clostridium innocuum, Dorea longicatena, Eisenbergiella tayi, Emergencia timonensis, Erysipelatoclostridium ramosum, Eubacterium callanderi, Faecalicatena orotica, Flavonifractor plautii, or Murimonas intestini. In some embodiments, one or more of the bacteria in a composition has at least about 97% identity, e.g., at least about 97%, at least about 97.5%, at least about 98%, at least about 98.5%, at least about 99% identity, to a 16S rDNA of the foregoing species. In some embodiments, a bacterial composition can comprise at least one, two, three, four, five, six, seven, eight, nine, ten, eleven, twelve, thirteen, fourteen, fifteen, or all of the bacterial species listed.

[0118] In some embodiments, a bacterial composition (e.g., designed composition) disclosed herein comprises one or more of the bacterial species disclosed in Tables 1-3, FIG. 1-2A, FIG. 4E, and/or FIG. 4F.

[0119] In some embodiments, a bacterial composition of the present disclosure comprises one or more bacteria comprising a 16S rDNA sequence that is at least about 85%, at least about 90%, at least about 95%, at least about 96%, at least about 97%, at least about 97.5%, at least about 98%, at least about 98.5%, at least about 99%, at least about 99.5%, or about 100% identical to a 16S rDNA sequence set forth in SEQ ID NOs: 1-352.

[0120] The term “16S sequencing” or “16S rDNA” or “16S” refers to sequence derived by characterizing the nucleotides that comprise the 16S ribosomal RNA gene(s). The bacterial 16S rDNA is approximately 1500 nucleotides in full length and can be referred to fragments ranging from a few nucleotides to full length of the 16S rDNA. 16S rDNA is used in reconstructing the evolutionary relationships and sequence similarity of one bacterial isolate to another using phylogenetic approaches. 16S sequences are used for phylogenetic reconstruction as they are in general highly conserved, but contain specific hypervariable regions that harbor sufficient nucleotide diversity to differentiate genera and species of most bacteria.

[0121] The term “V1-V9 regions” of the 16S rRNA refers to the first through ninth hypervariable regions of the 16S rRNA gene that are used for genetic typing of bacterial samples. These regions in bacteria are defined by nucleotides 69-99, 137-242, 433-497, 576-682, 822-879, 986-1043, 1117-1173, 1243-1294 and 1435-1465 respectively using numbering based on the E. coli system of nomenclature. Brosius et al., Complete nucleotide sequence of a 16S ribosomal RNA gene from Escherichia coli, PNAS (1978). In some embodiments, a sequence comprising at least one of the V1, V2, V3, V4, V5, V6, V7, V8, and V9 regions is used to characterize an OTU. In some embodiments, a sequence comprising at least all of the V1, V2, V3, V4, V5, V6, V7, V8, and V9 regions is used to characterize an OTU. In some embodiments, a sequence comprising the V1, V2, and V3 regions is used to characterize an OTU. In another embodiment, a sequence comprising the V3, V4, and V5 regions is used to characterize an OTU. In another embodiment, a sequence comprising the V3, and V4 regions is used to characterize an OTU. In another embodiment, a sequence comprising the V4, and V5 regions is used to characterize an OTU. In another embodiment, a sequence comprising the V4 region is used to characterize an OTU. A person of ordinary skill in the art can identify the specific hypervariable regions of a candidate 16S rRNA by comparing the candidate sequence in question to a reference sequence and identifying the hypervariable regions based on similarity to the reference hypervariable regions, or alternatively, one can employ Whole Genome Shotgun (WGS) sequence characterization of microbes or a microbial community.

[0122] In some embodiments, a bacterial composition disclosed herein (e.g., designed compositions) comprises both a spore-forming bacteria and a non-spore-forming bacteria. In some embodiments, a bacterial composition comprises only spore-forming bacteria. In some cases, the bacteria of the compositions are in spore form.

[0123] Applicant has also discovered that certain bacterial species are associated with exacerbation or non-improvement of at least one sign or symptom of a disease or disorder associated with dysbiosis of the gastrointestinal microbiome (e.g., infection, GvHD, mucositis). The presence of such species in a bacterial composition can be undesirable. Accordingly, in some embodiments, a bacterial composition (e.g., designed compositions) does not include one or more of the following bacterial species: Klebsiella pneumoniaea, Enterococcus faecium, Enterococcus faecalis, Bifidobacterium dentium, Dialister invisus, Prevotella copri, Veillonella atypica, Veillonella dispar, Veillonella parvula, or Veillonella ratti. In certain embodiments, a bacterial composition does not include one or more bacteria that has at least about 97%, e.g., about 99% identity, to a 16S rDNA of the foregoing species. In some embodiments, a bacterial composition does not include at least one, two, three, four, five, six, seven, eight, nine, or all of the species listed.

[0124] In some embodiments, a bacterial composition of the present disclosure does not comprise one or more bacteria comprising a 16S rDNA sequence that is at least about 85%, at least about 90%, at least about 95%, at least about 96%, at least about 97%, at least about 97.5%, at least 98%, at least about 98.5%, at least about 99%, at least about 99.5%, or about 100% identical to a 16S rDNA sequence set forth in SEQ ID NO: 1-352.

[0125] As described supra, bacteria that are beneficial for the treatment of a disease or disorder associated with dysbiosis (e.g., infection or GvHD following HSCT) are associated with certain biological functions. Accordingly, in some embodiments, types of bacteria present in a bacterial composition disclosed herein (e.g., designed compositions) are associated with certain biological functions, which are useful in treating, preventing, delaying, or ameliorating one or more signs or symptoms associated with a disease or disorder disclosed herein (e.g., infection or GvHD following HSCT). Non-limiting examples of relevant functional features are further described below.

### Functional Features

[0126] In some embodiments of the invention, a microbiome composition disclosed herein (e.g., designed compositions such as DE122435.3) is a composition that includes bacteria that can carry out certain functions identified herein as being useful for treating and/or preventing a disease or disorder associated with dysbiosis (e.g., infection or GvHD following HSCT). In certain embodiments, bacterial species that are useful for the present disclosure comprises one or more of the following features: (1) capable of engrafting (long-term and/or transient) when administered to a subject; (2) capable of having anti-inflammatory (e.g., inhibiting TNF-α-driven IL-8 secretion in epithelial cells in vitro, ability to downmodulate expression of inflammatory genes (e.g., CXCL1, CXCL2, CXCL3, CXCL11, ICAM1)); (3) not capable of inducing pro-inflammatory activity (e.g., does not induce IL-8 production by IECs); (4) capable of producing secondary bile acids (e.g., 7α-dehydroxylase and bile salt hydrolase activity); (5) capable of producing tryptophan metabolites (e.g., indole, 3-methyl indole, indolepropionic acid); (6) capable of restoring epithelial integrity, as determined by a primary epithelial cell monolayer barrier integrity assay; (7) capable of being associated with reduction of risk of infection or GvHD following HSCT; (8) capable of not being associated with clinical non-remission of infection or GvHD following HSCT; (9) capable of producing short-chain fatty acids (e.g., butyrate, propionate); (10) capable of inhibiting HDAC activity; (11) capable of producing a medium-chain fatty acid (e.g., valerate, hexanoate); (12) capable of expressing catalase activity; (13) capable of having alpha-fucosidase activity; (14) capable of inducing Wnt activation; (15) capable of producing B vitamins (e.g., thiamin (B1) and/or pyridoxamine (B6)); (16) capable of reducing fecal calprotectin level; (17) not capable of activating a toll-like receptor pathway (e.g., TLR4 or TLR5); (18) capable of activating a toll-like receptor pathway (e.g., TLR2); (19) capable of restoring colonization resistance; (20) capable of a broad range of carbon source utilization; (21) capable of reducing VRE pathogen carriage, (22) capable of reducing CRE pathogen carriage; (23) capable of reducing colonic inflammation; (24) capable of being associated with the healthy human gut microbiota; (25) capable of not being associated with toxin and hemolysin genes associated with Clostridial pathogens and no significant cytopathic effects in vitro; (26) susceptible to multiple clinically relevant antibiotics; (27) capable of not being associated with genes that are both likely responsible for the observed antibiotic resistances and transmissible, (28) capable of inhibiting epithelial cell apoptosis; (29) capable of downmodulating one or more genes induced in IFN-γ treated colonic organoids (e.g., those associated with inflammatory chemokine signaling, NF-κB signaling, TNF family signaling, type I interferon signaling, type II interferon signaling, TLR signaling, lymphocyte trafficking, Th17 cell differentiation, Th2 differentiation, apoptosis, inflammasomes, autophagy, oxidative stress, MEW class I and II antigen presentation, complement, mTor, nod-like receptor signaling, PI3K signaling, or combinations thereof), (30) capable of reducing the expression of one or more inhibitory receptors (e.g., TIGIT, TIM-3, or LAG-3) on T cells, (31) capable of increasing expression of one or more genes/proteins associated with T cell activation and/or function (e.g., CD45RO, CD69, IL-24, TNF-α, perforin, or IFN-γ), (32) capable of enhancing the ability of CD8+ T cells to kill tumor cells, (33) capable of enhancing the efficacy of an immune checkpoint inhibitor therapy, (34) capable of promoting the recruitment of CD8+ T cells to tumors, (35) capable of inducing an anti-inflammatory IL-10-skewed IL-10/IL-6 cytokine ratio in macrophages; (36) capable of inducing less inflammatory responses but similar pathogen defense responses in macrophages than a donor-derived spore-based composition (i.e., a spore-based composition), (37) capable of producing IL-18, or combinations thereof. In certain embodiments, species that are useful for the present disclosure comprises one, two, three, four, five, six, seven, eight, nine, ten, eleven, twelve, thirteen, fourteen, fifteen, sixteen, seventeen, eighteen, nineteen, twenty, twenty-one, twenty-two, twenty-three, twenty-four, twenty-five, twenty-six, twenty-seven, twenty-eight, twenty-nine, thirty, thirty-one, thirty-two, thirty-three, thirty-four, thirty-five, thirty-six, thirty-seven, thirty-eight, thirty-nine, or all of the above features.

[0127] Additional disclosure relating to exemplary functional features are provided below.

### Engraftment

[0128] As described supra, a key feature of the bacterial compositions disclosed herein is the ability of one or more bacterial species (or OTUs of bacteria) included in the compositions to engraft in a subject when administered to the subject. Accordingly, Applicant has identified bacteria and combinations of bacteria that are capable of engrafting when administered to a subject. Not to be bound by any one theory, engraftment of bacteria and combinations of bacteria disclosed herein can repopulate the gastrointestinal microbiome of a subject. In some embodiments, once engrafted, bacteria and combinations of bacteria disclosed herein prevent (e.g., by outcompeting for growth nutrients) the growth of non-commensal microbes (e.g., pathogenic bacteria, such as Clostridium difficile, ESKAPE pathogens (including: Enterococcus faecium, Staphylococcus aureus, Klebsiella pneumoniae, Acinetobacter baumannii, Pseudomonas aeruginosa, and Enterobacter spp.), Enterococcus species including but not limited to Enterococcus faecalis and Enterococcus faecium, Enterobacteriaceae species including but not limited to Klebsiella pneumonia, or such species that are resistant to vancomycin or carbapenems, drug resistant and multi-drug resistant organisms (MDROs) including VRE, CRE (including Klebsiella pneumoniae, Klebsiella oxytoca, Klebsiella aerogenes, Enterococcus species), drug resistant multi-drug resistant Enterobacteriaceae, and extended spectrum beta-lactamase (ESBLs) producing bacteria (including E. coli, Klebsiella species), or methicillin-resistant Staphylococcus aureus (MRSA)) that may result in local (e.g. GI) infection, or systemic (e.g. bloodstream or tissue) infection in the host, or promote inflammatory responses directly or indirectly (e.g. mucositis, GvHD). In further embodiments, once engrafted, bacteria and combinations of bacteria disclosed herein can promote or augment the growth of other commensal bacteria within the subject. In further embodiments, the engrafting bacteria and combinations of bacteria can produce various factors (e.g., tryptophan metabolites, fatty acids, secondary bile acids) or exert other functions (e.g., those disclosed herein) to help treat and/or prevent one or more symptoms associated with a disease or disorder disclosed herein.

[0129] Whether bacteria or combinations of bacteria are capable of engrafting can be determined by various methods known in the art. Subject samples can first be collected (e.g., by whole stool samples, rectal swaps, tissue biopsies, or mucosal samples) before and/or after administration of bacteria or combinations of bacteria. Subsequently, these samples can be characterized to identify the bacteria or combinations of bacteria. Administered bacterial strains can be identified in samples based on genotypic, phenotypic, and other molecular properties of the strains, for example: a) the sequence of certain genes (e.g., 16S rRNA sequence) b) the presence and/or sequence identity of one or more regions of DNA (i.e., linear segments) that are rarely present in other strains, rarely present in other microbiome samples, rarely present in the target patient population, or absent from the microbiome of the particular subject(s) before administration of the bacteria, c) DNA variants including SNVs, insertions and deletions (i.e., indels), structural variation, gene copy number variation, or other DNA variants that are rarely present in other strains, rarely present in other microbiome samples, rarely present in the target patient population, or absent from the microbiome of the particular subject(s) before administration of the bacteria, d) other identifying phenotypic, genomic, proteomic, metabolomic or other properties of the administered strains. Molecular technologies used to identify administered bacteria or combinations of bacteria include but are not limited various DNA sequencing technologies including PCR and qPCR, amplicon sequencing, whole genome sequencing, shotgun metagenomic sequencing; other molecular technologies can be used included but not limited to microarray, multiplexed molecular barcode (e.g., available from NanoString Technologies), and mass spectrometry. Bioinformatic methods used to analyze these data may include sequence alignment and mapping, genome or metagenome assembly, or other methods. Microbiological and culturing methods can also be used to identify and characterize strains. These mentioned methods of identification and characterization of administered bacteria or combinations of bacteria can be used alone or in combination.

[0130] In some embodiments, one or more of the bacterial species included in the bacterial compositions disclosed herein are capable of engrafting when administered to a subject. In certain embodiments, each of the bacterial species included in a bacterial composition is capable of engrafting. In some embodiments, the bacteria and combinations of bacteria that are capable of engrafting are long-term engrafters. In certain embodiments, the bacteria and combinations of bacteria that are capable of engrafting are transient engrafters. In some embodiments, the bacterial compositions disclosed herein (e.g., designed compositions) comprise one or more long-term engrafters and one or more transient engrafters. In certain embodiments, a bacterial composition disclosed herein comprises two, three, four, five, six, seven, eight, nine, ten or more long-term engrafters. In some embodiments, a bacterial composition comprises two, three, four, five, six, seven, eight, nine, ten or more transient engrafters. In any such embodiments, the bacterial composition disclosed herein can also include one, two, three, four, five, six, seven, eight, nine, ten or more species not defined as long-term or transient engrafters. In further embodiments, a bacterial composition disclosed herein comprises three or more transient engrafters and/or three or more long-term engrafters, four or more transient engrafters and/or four or more long-term engrafters, five or more transient engrafters and/or four or more long-term engrafters, six or more transient engrafters and/or four or more long-term engrafters, seven or more transient engrafters and/or four or more long-term engrafters, eight or more transient engrafters and/or four or more long-term engrafters, nine or more transient engrafters and/or four or more long-term engrafters, or ten or more transient engrafters and/or four or more long-term engrafters. In any such embodiments, the bacterial composition disclosed herein can also include one, two, three, four, five, six, seven, eight, nine, ten or more species not defined as long-term or transient engrafters. In further embodiments, a bacterial composition disclosed herein comprises ten or more transient engrafters and/or four or more long-term engrafters and/or two or more species not defined as either. Non-limiting examples of long-term engrafters and/or transient engrafters that can be used with the present disclosure are provided in Table 1.

### Bile Acids

[0131] Applicant has discovered that certain secondary bile acids are associated with the treatment and/or prevention of a disease or disorder, such as those associated with a dysbiosis (e.g., infection or GvHD following HSCT). The term “bile acids” refers to a family of molecules, composed of a steroid structure with four rings, a five or eight carbon side-chain terminating in a carboxylic acid joined at the 17-position of the steroid scaffold, and the presence and orientation of different numbers of hydroxy groups. Depending on the tissue, the structure of the bile acids can vary. For instance, upon their synthesis in the liver, the bile acids are conjugated to either taurine or glycine residues (“conjugated primary bile acids” also known as bile salts) and subsequently excreted and stored in the gall bladder. During digestion, the conjugated primary bile acids are then secreted into the intestinal lumen. In some embodiments, the primary conjugated bile acids are glycocholic acid (gCA), taurocholic acid (tCA), glycochenodeoxycholic acid (gCDCA), or taurochenodeoxycholic acid (tCDCA).

[0132] Within the intestinal lumen, the resident intestinal bacteria express enzymes (e.g., bile salt hydrolase (BSH)), which deconjugate the conjugated primary bile acids to produce “primary bile acids.” In some embodiments, the primary bile acids comprise cholic acid (CA) or chenodeoxycholic acid (CDCA). Primary bile acids are then further processed (via enzymes, such as hydroxysteroid dehydrogenase (HSDH) or 7α-dehydroxylase) to become “secondary bile acids.” Accordingly, in some aspects, the phrase “capable of producing a secondary bile acid” comprises the ability to deconjugate primary bile acids to produce the secondary bile acids. In some embodiments, the secondary bile acids comprise deoxycholic acid (DCA), (3 or 12)-oxo-deoxycholic acid, (3 or 12)-iso-deoxycholic acid, (3, 7 or 12)-oxo-cholic acid, (3, 7 or 12)-iso-cholic acid, lithocholic acid (LCA), oxo-LCA, iso-LCA, (3 or 7)-oxo-chenodeoxy cholic acid, or (3 or 7)-iso-chenodeoxy cholic acid.

[0133] The secondary bile acids produced in the intestinal lumen can circulate back to the liver, where they are reconjugated to become “conjugated secondary bile acids.” In some embodiments, the secondary conjugated bile acids of the present disclosure comprise (3 or 12)-glyco-iso-deoxycholic acid, (3 or 12)-tauro-iso-deoxycholic acid, glyco-deoxycholic acid, tauro-deoxycholic acid, (3, 7 or 12)-glyco-iso-cholic acid, (3, 7 or 12)-tauro-iso-cholic acid, sulfo-lithocholic acid, glyco-sulfo-lithocholic acid, tauro-sulfo-lithocholic acid, (3 or 7)-glyco-iso-chenodeoxycholic acid, (3 or 7)-tauro-iso-chenodeoxycholic acid, (3 or 7)-glyco-oxo-chenodeoxycholic acid, or (3 or 7)-tauro-oxo-chenodeoxycholic acid.

[0134] In some embodiments, one or more of the bacterial species that can be used in constructing the designed compositions disclosed herein comprise an enzyme involved in secondary bile acid production. In certain embodiments, the enzyme comprises BSH or HSDH. In some embodiments, a bacterial species useful for the present disclosure comprises both BSH and HSDH. Accordingly, in some embodiments, bacteria and combinations of bacteria disclosed herein can increase the level of a bile acid (e.g., a secondary bile acid, e.g., deoxycholic acid (DCA), 3-α-12-oxo-deoxycholic acid, 3-α-7-oxo-deoxycholic acid, 3-α-12-α-7-oxo-deoxycholic acid, 3-α-7-α-12-oxo-deoxycholic acid, 3-β-12-α-deoxycholic acid (3-isodeoxycholic acid), 7-α-3-oxo-chenodeoxycholic acid, lithocholic acid (LCA), 3-oxo LCA, oxo-LCA, iso-LCA, urso-deoxycholic acid (UDCA), and combinations thereof) in a subject.

[0135] In some embodiments, the level of a secondary bile acid is increased by at least about 1%, at least about 5%, at least about 10%, at least about 15%, at least about 20%, at least about 25%, at least about 30%, at least about 35%, at least about 40%, at least about 45%, at least about 50%, at least about 55%, at least about 60%, at least about 65%, at least about 70%, at least about 75%, at least about 80%, at least about 85%, at least about 90%, at least about 95%, or at least about 100%, compared to a corresponding level in a reference sample. In some embodiments, the reference sample is a biological sample (e.g., fecal sample) obtained from a subject prior to the administration of a bacterial composition disclosed herein. In other embodiments, the reference sample is a biological sample (e.g., fecal sample) obtained from a subject with an active symptom of a disease or disorder, such as those associated with dysbiosis (e.g., infection or GvHD following HSCT).

[0136] In some embodiments, the increase in the level of a secondary bile acid can reduce the level of a pro-inflammatory mediators (e.g., TNF-α or IL-8) produced by activated cells (e.g., LPS-stimulated monocytes, LPS-stimulated PBMCs, or TNF-α-stimulated intestinal epithelial cells). In some embodiments, the increase in the level of a secondary bile acid is correlated with increased populations of anti-inflammatory T regulatory cells, involved in the suppression of GvHD, in the periphery or colon. In some embodiments, the increase in the level of a secondary bile acid can protect epithelial cell viability, reduce mortality in murine models of GvHD, and reduce non-relapse mortality in some HSCT patients with post-transplant liver complications.

[0137] In certain embodiments, the amount of pro-inflammatory mediators produced by activated cells is decreased by at least about 1%, at least about 5%, at least about 10%, at least about 15%, at least about 20%, at least about 25%, at least about 30%, at least about 35%, at least about 40%, at least about 45%, at least about 50%, at least about 55%, at least about 60%, at least about 65%, at least about 70%, at least about 75%, at least about 80%, at least about 85%, at least about 90%, at least about 95%, or at least about 100%, compared to a reference sample (e.g., activated cells not treated with increased concentration of a secondary bile acid). In some embodiments, the level of anti-inflammatory mediators produced is increased by at least about 1%, at least about 5%, at least about 10%, at least about 15%, at least about 20%, at least about 25%, at least about 30%, at least about 35%, at least about 40%, at least about 45%, at least about 50%, at least about 55%, at least about 60%, at least about 65%, at least about 70%, at least about 75%, at least about 80%, at least about 85%, at least about 90%, at least about 95%, or at least about 100% compared to a reference sample (e.g., activated cells not treated with increased concentration of a secondary bile acid).

[0138] In some embodiments, reducing the level of certain secondary bile acids can be important in the effective treatment of a disease or disorder disclosed herein. Accordingly, in certain embodiments, bacteria and combinations of bacteria that are useful for the present disclosure are capable of reducing the level of a secondary bile acid in a subject. In some embodiments, the level of a secondary bile acid is reduced by at least about 1%, at least about 5%, at least about 10%, at least about 15%, at least about 20%, at least about 25%, at least about 30%, at least about 35%, at least about 40%, at least about 45%, at least about 50%, at least about 55%, at least about 60%, at least about 65%, at least about 70%, at least about 75%, at least about 80%, at least about 85%, at least about 90%, at least about 95%, or at least about 100%, compared to a corresponding level in a reference sample. In some embodiments, the reference sample is a biological sample (e.g., fecal sample) obtained from a subject prior to the administration of a bacterial composition disclosed herein. In other embodiments, the reference sample is a biological sample (e.g., fecal sample) obtained from a subject with an active symptom of a disease or disorder, such as those associated with dysbiosis (e.g., infection or GvHD following HSCT).

### Anti-Inflammatory Activity

[0139] Applicant has identified bacteria and combinations of bacteria that are capable of exhibiting anti-inflammatory activity when administered to a subject. As used herein, the term “anti-inflammatory activity” refers to the ability to prevent and/or reduce inflammation. The term “inflammation” or “pro-inflammatory” refers to the complex biological response of an individual's immune system to harmful stimuli, such as pathogens, damaged cells, or irritants, and includes secretion of pro-inflammatory mediators, such as pro-inflammatory cytokines, i.e., cytokines which are produced predominantly by activated immune cells, such as macrophages and dendritic cells, and are involved in the amplification of inflammatory reactions.

[0140] Without being limited to any one particular theory, the anti-inflammatory activity observed with the bacteria and combinations of bacteria disclosed herein can be related to the other functional aspects of the bacteria or combinations of bacteria. For example, in some embodiments, the anti-inflammatory activity is related to the ability of the bacteria or combinations of bacteria to produce a secondary bile acid, a tryptophan metabolite, a short-chain fatty acid, inhibit HDAC inhibition, inhibit TNF-α-driven IL-8 secretion in epithelial cells in vitro, inhibit IFNγ-driven induction of inflammatory and apoptosis pathways in human primary colonic organoids in vitro and/or stimulate IL-10 production by macrophages in vitro. In some aspects, the anti-inflammatory activity (e.g., as demonstrated by IL-8 secretion) is improved compared to a bacterial spore preparation from healthy human donor stool (see, e.g., Example 6). Accordingly, in some embodiments, the bacteria and combinations of bacteria that have anti-inflammatory activity have one or more of the following features: (i) capable of producing a short-chain fatty acid, (ii) capable of inhibiting histone deacetylase (HDAC) activity, (iii) capable of inhibiting TNF-α-driven IL-8 secretion in epithelial cells in vitro, (iv) capable of inhibiting NF-kB and NF-kB target genes, (v) capable of downmodulating one or more genes induced in IFN-γ treated colonic organoids (e.g., those associated with inflammatory chemokine signaling, NF-κB signaling, TNF family signaling, type I interferon signaling, type II interferon signaling, TLR signaling, lymphocyte trafficking, Th17 cell differentiation, Th2 differentiation, apoptosis, inflammasomes, autophagy, oxidative stress, WIC class I and II antigen presentation, complement, mTor, nod-like receptor signaling, PI3K signaling, or combinations thereof), (vi) capable of inducing anti-inflammatory IL-10 production in macrophages in vitro; or (vii) capable of downmodulating expression of one or more inflammatory genes (e.g., CXCL1, CXCL2, CXCL3, CXCL11, ICAM1), (viii) capable of inducing regulatory T cells (Tregs), (ix) capable of inducing a higher ratio of Tregs compared to Th1 and/or Th17 cells in the colonic lamina propria, or any combination thereof. In some aspects, designed composition DE122435.3 downregulates expression of chemokines CXCL1, CXCL2, CXCL5, and CXCL8. Whether bacteria or combinations of bacteria have anti-inflammatory activity can be measured using assays known in the art, including methods to measure metabolites like short-chain fatty acids (e.g., MS, LC-MS, GS-MS, LC-MS/MS), methods of measuring gene expression at the RNA and/or protein level (e.g., multiplexed bead-based (e.g., available from Luminex) cytokine panels, microarray, multiplexed molecular barcode (e.g., available from NanoString Technologies), and RNA-sequencing).

[0141] As described herein, designed composition DE122435.3 elicits significantly reduced pro-inflammatory cytokine or transcriptional changes in human macrophages while also maintaining key functionality for innate defense and thus is an improvement over natural communities (i.e., spore-prep compositions from healthy human donor stool).

[0142] In some embodiments, the anti-inflammatory activity of the bacteria and combinations of bacteria disclosed herein can reduce the amount of pro-inflammatory mediators produced and/or present in a subject (e.g., suffering from a disease or disorder disclosed herein). In certain embodiments, the amount of pro-inflammatory mediators produced and/or present in the subject is decreased by at least about 1%, at least about 5%, at least about 10%, at least about 15%, at least about 20%, at least about 25%, at least about 30%, at least about 35%, at least about 40%, at least about 45%, at least about 50%, at least about 55%, at least about 60%, at least about 65%, at least about 70%, at least about 75%, at least about 80%, at least about 85%, at least about 90%, at least about 95%, or at least about 100%, compared to a reference sample. In some embodiments, the reference sample is a biological sample obtained from a subject prior to the administration of a bacterial composition disclosed herein. In other embodiments, the reference sample is a biological sample obtained from a subject with an active symptom of a disease or disorder, such as those associated with dysbiosis (e.g., infection or GvHD following HSCT).

[0143] In some embodiments, the anti-inflammatory activity of the bacteria and combinations of bacteria disclosed herein can increase the amount of anti-inflammatory mediators in a subject. Non-limiting examples of anti-inflammatory mediators include, but are not limited to, IL-1 receptor antagonists (IL-1RA), IL-4, IL-10, IL-11, IL-13, TGF-0, and combinations thereof. In certain embodiments, the bacteria and combinations of bacteria that are capable of exhibiting anti-inflammatory activity can increase the amount of anti-inflammatory mediators in a subject by at least about 1%, at least about 5%, at least about 10%, at least about 15%, at least about 20%, at least about 25%, at least about 30%, at least about 35%, at least about 40%, at least about 45%, at least about 50%, at least about 55%, at least about 60%, at least about 65%, at least about 70%, at least about 75%, at least about 80%, at least about 85%, at least about 90%, at least about 95%, or at least about 100%, compared to a reference sample. In some embodiments, the reference sample is a biological sample obtained from a subject prior to the administration of a bacterial composition disclosed herein. In other embodiments, the reference sample is a biological sample obtained from a subject with an active symptom of a disease or disorder, such as those associated with dysbiosis (e.g., infection or GvHD following HSCT).

### Tryptophan Metabolism and Aryl Hydrocarbon Receptor

[0144] As used herein, the term “tryptophan” refers to the essential amino acid tryptophan, which is an α-amino acid and has a chemical formula of C₁₁H₁₂N₂O₂. Besides its use in protein synthesis, tryptophan is important in a number of pathways leading to the production of, for example, serotonin (5-hydroxytryptamine), melatonin, kynurenines, and tryptamine. Tryptophan and its metabolites can affect, for example, immunosuppression, immune function, cancer, inflammatory disease, epithelial barrier function, and infection.

[0145] Certain tryptophan pathway products have been shown to function as aryl hydrocarbon receptor (Ahr) agonists. The metabolites include, for example, indole, indole-3 aldehyde, indole-3 acetate, indole-3 propionic acid, indole, 3-methylindole, indole-3 acetaldehyde, indole-3 acetonitrile, 6-formylindolo[3,2-b]carbazole (FICZ), and tryptamine. Ahr plays a role in controlling the differentiation and activity of specific T cell subpopulations. It reportedly can influence adaptive immune responses through its effects on both T cells and antigen presenting cells (APCs). Ahr is thought to be involved in development and maintenance of CD4+ T regulatory cells (Tregs) as well as FoxP3-IL-10+ CD4+ Tr1, and induction of Th17 cells. Ahr also alters cytokine expression by Type 3 innate lymphoid cells (ILC3s). These cellular effects include increased production of IL-22. AhR induction by Trp metabolites has been reported to enhance epithelial barrier integrity and ameliorate colitis in in vivo models.

[0146] In some embodiments, bacteria or combinations of bacteria disclosed herein can increase the level of a tryptophan metabolite in a subject. In some embodiments, tryptophan metabolite comprises indole, 3-methyl indole, indoleacrylate, or any combination thereof. In certain embodiments, bacteria or combination of bacteria disclosed herein can increase the level of indole and/or 3-methylindole in the subject.

[0147] In some embodiments, the level of a tryptophan metabolite is increased by at least about 1%, at least about 5%, at least about 10%, at least about 15%, at least about 20%, at least about 25%, at least about 30%, at least about 35%, at least about 40%, at least about 45%, at least about 50%, at least about 55%, at least about 60%, at least about 65%, at least about 70%, at least about 75%, at least about 80%, at least about 85%, at least about 90%, at least about 95%, or at least about 100%, compared to a corresponding level in a reference sample. In some embodiments, the reference sample is a biological sample (e.g., fecal sample) obtained from a subject prior to the administration of a bacterial composition disclosed herein. In other embodiments, the reference sample is a biological sample (e.g., fecal sample) obtained from a subject with an active symptom of a disease or disorder, such as those associated with dysbiosis (e.g., infection or GvHD following HSCT).

[0148] In some embodiments, reducing the level of a tryptophan metabolite in a subject might be useful in treating a disease or disorder. Accordingly, in certain embodiments, bacteria and combinations of bacteria disclosed herein are capable of reducing the level of a tryptophan metabolite in a subject. In some embodiments, the level of a tryptophan metabolite is reduced by at least about 1%, at least about 5%, at least about 10%, at least about 15%, at least about 20%, at least about 25%, at least about 30%, at least about 35%, at least about 40%, at least about 45%, at least about 50%, at least about 55%, at least about 60%, at least about 65%, at least about 70%, at least about 75%, at least about 80%, at least about 85%, at least about 90%, at least about 95%, or at least about 100%, compared to a corresponding level in a reference sample. In some embodiments, the reference sample is a biological sample (e.g., fecal sample) obtained from a subject prior to the administration of a bacterial composition disclosed herein. In other embodiments, the reference sample is a biological sample (e.g., fecal sample) obtained from a subject with an active symptom of a disease or disorder, such as those associated with dysbiosis.

### Fatty Acids

[0149] Applicant has identified bacteria and combinations of bacteria that are capable of producing certain fatty acids in a subject. In some embodiments, fatty acids comprise short-chain fatty acids. In other embodiments, fatty acids comprise medium-chain fatty acids. As used herein, the term “short-chain fatty acids” refer to fatty acids with less than six carbon atoms. Non-limiting examples of short-chain fatty acids include formate, acetate, propionate, butyrate, isobutryate, valerate, isovalerate, and combinations thereof. In certain embodiments, short-chain fatty acid comprises acetate, propionate, butyrate, or combinations thereof. As used herein, the term “medium-chain fatty acids” refer to fatty acids with aliphatic tails of 5 to 12 carbon atoms, which can form medium-chain triglycerides. Non-limiting examples of medium-chain fatty acids include pentanoate (valerate), hexanoate, oxtanoate, decanoate, dodecanoate, and combinations thereof. In some embodiments, medium-chain fatty acid comprises hexanoate.

[0150] In some embodiments, bacteria or combination of bacteria disclosed herein increases the level of a short-chain fatty acid in a subject. In certain embodiments, short-chain fatty acid comprises formate, acetate, propionate, butyrate, isobutryate, valerate, isovalerate, or any combination thereof. In some embodiments, the short-chain fatty acid comprises propionate, butyrate, acetate, or combinations thereof. In some embodiments, the level of a short-chain fatty acid in the subject is increased by at least about 1%, at least about 5%, at least about 10%, at least about 15%, at least about 20%, at least about 25%, at least about 30%, at least about 35%, at least about 40%, at least about 45%, at least about 50%, at least about 55%, at least about 60%, at least about 65%, at least about 70%, at least about 75%, at least about 80%, at least about 85%, at least about 90%, at least about 95%, or at least about 100%, compared to a corresponding level in a reference sample. In some embodiments, the reference sample is a biological sample (e.g., fecal sample) obtained from a subject prior to the administration of a bacterial composition disclosed herein. In other embodiments, the reference sample is a biological sample (e.g., fecal sample) obtained from a subject with an active symptom of a disease or disorder, such as those associated with dysbiosis (e.g., infection or GvHD following HSCT).

[0151] In some embodiments, bacteria or combination of bacteria disclosed herein increases the level of a medium-chain fatty acid in a subject. In certain embodiments, the medium-chain fatty acid comprises hexanoate. In some embodiments, the level of a medium-chain fatty acid in the subject is increased by at least about 1%, at least about 5%, at least about 10%, at least about 15%, at least about 20%, at least about 25%, at least about 30%, at least about 35%, at least about 40%, at least about 45%, at least about 50%, at least about 55%, at least about 60%, at least about 65%, at least about 70%, at least about 75%, at least about 80%, at least about 85%, at least about 90%, at least about 95%, or at least about 100%, compared to a corresponding level in a reference sample. In some embodiments, the reference sample is a biological sample (e.g., fecal sample) obtained from a subject prior to the administration of a bacterial composition disclosed herein. In other embodiments, the reference sample is a biological sample (e.g., fecal sample) obtained from a subject with an active symptom of a disease or disorder, such as those associated with dysbiosis (e.g., infection or GvHD following HSCT).

### Inhibition of Histone Deacetylase (HDAC) Activity

[0152] Histone deacetylases (HDACs) are a family of enzymes that can remove acetyl residues from specific sites in the N-terminal end of histones, which are part of the DNA chromatin structure in eukaryotic cells. The steady state of histone acetylation is a result of the balance of acetylation by histone acetyltransferase (HAT) enzymes and deacetylation by HDACs. When HDACs are inhibited but HATs activity continues, histones become hyperacetylated, thus disrupting high order chromatin structure and stimulating transcription by RNA polymerase III. The effect of HDAC inhibition in gene expression is not generalized, as only 2% of mammalian genes are affected by HDAC inhibition.

[0153] Some short chain fatty acids (SCFAs) produced by the intestinal human microbiome are HDAC inhibitors. Butyrate in particular has been identified as an HDAC inhibitor in vitro and in vivo, leading to the accumulation of hyperacetylated histones H3 and H4 (Candido et al., 1978 Cell 14:105-113; Boffa et al. 1978 J Biol Chem 253:3364-3366; Vidali et al. 1978 Proc Natl Acad Sci USA 75:2239-2243; Davie. 2003 J Nutrition 133:2485S-2493S). Other SCFAs, such as propionate, isobutyrate, isovalerate, valerate, lactate, and acetate, can also inhibit histone deacetylation, although reportedly less effectively than butyrate (Sealy and Chalkley. 1978 Cell 14:115-121; Latham et al. Nucl Acids Res 40:4794-4803, Waldecker et al. 2008 J Nutr Biochem 19:587-593). Certain therapeutic effects of butyrate are reportedly mediated, at least in part, by inhibition of HDAC s.

[0154] In some embodiments, bacteria and combinations of bacteria disclosed herein are capable of inhibiting (or reducing) HDAC activity. In some embodiments, bacteria and combinations of bacteria disclosed herein can inhibit (or reduce) HDAC activity in a subject by at least about 1%, at least about 5%, at least about 10%, at least about 15%, at least about 20%, at least about 25%, at least about 30%, at least about 35%, at least about 40%, at least about 45%, at least about 50%, at least about 55%, at least about 60%, at least about 65%, at least about 70%, at least about 75%, at least about 80%, at least about 85%, at least about 90%, at least about 95%, or at least about 100%, compared to a reference sample. In some embodiments, the reference sample is a biological sample obtained from a subject prior to the administration of a bacterial composition disclosed herein. In other embodiments, the reference sample is a biological sample obtained from a subject with an active symptom of a disease or disorder, such as those associated with dysbiosis (e.g., infection or GvHD following HSCT).

### Protection of Epithelial Barrier

[0155] Intestinal epithelial cells are the first line of defense against gut pathogens. They form a physical barrier between luminal contents (microbiome and dietary antigens) and the underlying host immune system. A complex network of intercellular junction proteins and cytoskeletal proteins function together in maintaining a tight impermeable barrier (Buckley & Turner, Cold Spring Harbor perspectives in biology, 10(1), a029314, 2018). Notably, junction proteins like tight junction proteins, claudins and occludins play critical roles in maintaining an intact barrier (Buckley & Turner, Cold Spring Harbor perspectives in biology, 10(1), a029314, 2018).

[0156] A variety of microbial byproducts are beneficial for the barrier. For example, short-chain fatty acids (SCFAs) have been shown to improve barrier function by regulating tight junction protein assembly (Peng, et al., The Journal of nutrition, 139(9), 1619-1625, 2008). The SCFA butyrate has been shown to improve barrier function by stabilizing the hypoxia-inducible transcription factor, HIF-1α. Stable HIF-1α, in turn, strengthens the barrier by yet uncharacterized mechanisms (Kelly, at al., Cell host & microbe, 17(5), 662-671, 2005). Butyrate downregulates expression of a pore-forming protein, claudin-2. Claudin-2 is associated with a ‘diarrhetic’ phenotype, where increased expression leads to a leakier barrier. Thus, butyrate-mediated downregulation of claudin-2 strengthens the barrier (Zheng, et al., Journal of immunology, 199(8), 2976-2984, 2017). Furthermore, tryptophan catabolites also have roles in bolstering the barrier. Specifically, indole has been shown both in vivo and in vitro to enhance barrier function (Shimada, et al., PLoS ONE 8(11): e80604, 2013; Bansal, et al., PNAS, 107(1), 228-233, 2010).

[0157] In some embodiments, bacteria and combinations of bacteria disclosed herein are capable of reducing damage to an epithelial barrier. In some embodiments, bacteria and combinations of bacteria disclosed herein are capable of reducing damage to an epithelial barrier in a subject in a subject by at least about 1%, at least about 5%, at least about 10%, at least about 15%, at least about 20%, at least about 25%, at least about 30%, at least about 35%, at least about 40%, at least about 45%, at least about 50%, at least about 55%, at least about 60%, at least about 65%, at least about 70%, at least about 75%, at least about 80%, at least about 85%, at least about 90%, at least about 95%, or at least about 100%, compared to a reference. In some embodiments, bacteria and combinations of bacteria disclosed herein are capable of improving epithelial barrier status in the gastrointestinal tract of the subject. In some embodiments, bacteria and combinations disclosed herein are capable of improving epithelial barrier status by at least 5%, at least 10%, at least 20%, at least 30%, at least 40%, at least 50%, at least 60%, at least 70%, at least 80%, or at least 90% compared to a reference. In some embodiments, the reference is a biological sample obtained from a subject prior to the administration of a bacterial composition disclosed herein. In other embodiments, the reference is a biological sample obtained from a subject with an active symptom of a disease or disorder, such as those associated with dysbiosis (e.g., infection or GvHD following HSCT).

### Other Functional Features

[0158] As described supra, in addition to the specific functions detailed above, in some embodiments, bacteria or combinations of bacteria disclosed herein can further comprise one or more of the following functional features: (i) capable of inducing Wnt activation, (ii) capable of producing B vitamins (e.g., thiamin (B1) and pyridoxamine (B6)), (iii) capable of reducing fecal calprotectin level, (iv) capable of restoring colonization resistance, (v) capable of a broad range of carbon source utilization; (vi) capable of reducing VRE pathogen carriage, (vii) capable of reducing CRE pathogen carriage, (viii) capable of reducing colonic inflammation, (ix) susceptible to multiple clinically relevant antibiotics, (x) capable of downmodulating one or more genes induced in IFN-γ treated colonic organoids (e.g., those associated with inflammatory chemokine signaling, NF-κB signaling, TNF family signaling, type I interferon signaling, type II interferon signaling, TLR signaling, lymphocyte trafficking, Th17 cell differentiation, Th2 differentiation, apoptosis, inflammasomes, autophagy, oxidative stress, MHC class I and II antigen presentation, complement, mTor, nod-like receptor signaling, PI3K signaling, or combinations thereof), (xi) capable of reducing the expression of one or more inhibitory receptors (e.g., TIGIT, TIM-3, or LAG-3) on T cells, (xii) capable of increasing expression of one or more genes/proteins associated with T cell activation and/or function (e.g., CD45RO, CD69, IL-24, TNF-α, perforin, or IFN-γ), (xiii) capable of enhancing the ability of CD8+ T cells to kill tumor cells, (xiv) capable of enhancing the efficacy of an immune checkpoint inhibitor therapy, (xv) capable of promoting the recruitment of CD8+ T cells to tumors, (xvi) capable of inhibiting induction of epithelial apoptosis, (xvii) capable of restoring epithelial integrity, as determined by a primary epithelial cell monolayer barrier integrity assay, (xviii) capable of being associated with reduction of risk of infection or GvHD following HSCT, (xix) capable of not being associated with clinical non-remission of infection or GvHD following HSCT, (xx) capable of expressing catalase activity, (xxi) capable of having alpha-fucosidase activity, (xxii) capable of being associated with the healthy human gut microbiota, (xxiii) capable of producing IL-18, (xxiv) capable of inducing an anti-inflammatory IL-10-skewed IL-10/IL-6 cytokine ratio in macrophages; (xxv) capable of producing IL-18, or (xxvii) any combination thereof. In further embodiments, bacteria or combinations of bacteria disclosed herein are not capable of activating a toll-like receptor pathway (e.g., TLR4 or TLR5). In certain embodiments, bacteria or combinations of bacteria disclosed herein are capable of activating a toll-like receptor pathway (e.g., TLR2).

[0159] The levels of any of the biological molecules (e.g., those described above) in a subject suffering from a disease or disorder disclosed herein (can be measured as described in the present disclosure (see, e.g., Examples) or by any other methods known in the art.

[0160] In some embodiments, a bacterial composition of the present disclosure (e.g., designed compositions) comprises one or more bacteria that are capable of forming spores (i.e., spore-forming bacteria). Accordingly, in some embodiments, a bacterial composition comprises a purified population of bacteria, wherein the bacteria are in the form of spores. In some embodiments, all the bacteria are in the form of spores. In other embodiments, some of the bacteria are in the form of spores, while other bacteria are not in the form of spores (i.e., vegetative-state). In some embodiments, the bacterial composition comprises a purified population of spore-forming bacteria, wherein the bacteria are all in the vegetative-state.

[0161] In some embodiments, a bacterial composition comprises a population of bacteria that are sensitive to one or more antibiotics that can be used in a human. In some embodiments, bacteria of the composition are resistant to one or more antibiotics that are used to prophylactically treat patients with a disease or disorder, such as those associated with dysbiosis of the gastrointestinal tract (e.g., infection or GvHD following HSCT). Such antibiotics include, but are not limited to, β-lactams, vancomycin, aminoglycosides, fluoroquinolones, and carbapenems.

[0162] In some embodiments, a strain of an OTU useful for the present disclosure (e.g., an OTU disclosed herein) can be obtained from a public biological resource center such as the ATCC (atcc.org), the DSMZ (dsmz.de), or the Riken BioResource Center (en.brc.riken.jp). Methods for determining sequence identity are known in the art.

[0163] In some embodiments, the composition is a designed composition. Non-limiting examples of designed compositions are provided in FIGS. 1 and 2A. The exemplary DEs disclosed herein were designed to capture key functional and phylogenetic attributes as described herein.

### II. Formulations

[0164] Further provided herein are formulations for administration to humans and other subjects in need thereof (e.g., subject suffering from a disease or disorder disclosed herein). Generally, a bacterial composition as described herein is combined with additional active and/or inactive materials to produce a formulation. In some embodiments, a bacterial composition is formulated in a unit dosage form, each dosage form containing, e.g., from about 10² to about 10⁹ CFUs, for example, about 10⁴ to about 10⁸ CFUs. As described herein, in some aspects, all the bacteria of a composition described herein can be formulated as spores. In some aspects, the spores can be formulated as lyophilized spores. In some aspects, the spores can be suspended in a cryoprotectant, for example glycerol. In some aspects, all the bacteria of a composition described herein can be vegetative cells. In some aspects, a bacterial composition described herein can comprise a mixture of spores and vegetative bacteria. In some aspects, bacterial spores and vegetative bacteria can be formulated at the same dosage. In some aspects, bacterial spores and vegetative bacteria can be formulated at different dosages. For example, when a bacterial composition comprises both bacterial spores and vegetative bacteria, the vegetative bacteria can be formulated at a higher dose compared to the bacterial spores. In some aspects, the bacterial spores are formulated at a higher dose compared to the vegetative bacteria. In other embodiments, a bacterial composition is formulated in a multi-dose format. Formulations and methods of formulating that can be used with the bacterial compositions described herein are described in WO2020118054, which is incorporated by reference herein in its entirety.

[0165] The formulations disclosed herein can be effective over a wide dosage range and is generally administered in a pharmaceutically effective amount.

[0166] The term “effective dose” or “effective dosage” is defined as an amount sufficient to achieve or at least partially achieve a desired effect. A “therapeutically effective amount” or “therapeutically effective dosage” of a drug or therapeutic agent is any amount of the drug that, when used alone or in combination with another therapeutic agent, promotes disease regression evidenced by a decrease in severity of disease symptoms, an increase in frequency and duration of disease symptom-free periods, or a prevention of impairment or disability due to the disease affliction. A therapeutically effective amount or dosage of a drug includes a “prophylactically effective amount” or a “prophylactically effective dosage”, which is any amount of the drug that, when administered alone or in combination with another therapeutic agent to a subject at risk of developing a disease or of suffering a recurrence of disease, inhibits the development or recurrence of the disease. The ability of a therapeutic agent to promote disease regression or inhibit the development or recurrence of the disease can be evaluated using a variety of methods known to the skilled practitioner, such as in human subjects during clinical trials, in animal model systems predictive of efficacy in humans, or by assaying the activity of the agent in in vitro assays.

[0167] As used herein, the term “dosage” can refer to the total number of colony forming units (CFUs) of each individual species or strain; or can refer to the total number of microorganisms in the dose. It is understood in the art that determining the number of organisms in a dosage is not exact and can depend on the method used to determine the number of organisms present. If the composition includes spores, for example, the number of spores in a composition can be determined using any suitable methods known in the art, e.g., a dipicolinic acid assay (Fichtel et al., FEMS Microbiol Ecol 61: 522-532 (2007)), or a spore forming colony unit (SCFU) assay. Effective doses can be extrapolated from dose-response curves derived from in vitro or animal model test systems.

[0168] As used herein, the term “unit dosage forms” or “dosage unit forms” refers to physically discrete units suitable as unitary dosages for human subjects and other mammals, each unit containing a predetermined quantity of active component calculated to produce the desired therapeutic effect, in association with a suitable pharmaceutical excipient. For instance, in some aspects, a unit dosage form can be in the form of a solid (e.g., capsules, tablets, caplets, pills, troches, lozenges, powders, and granules). In some aspects, a unit dosage form can be in the form of a liquid (e.g., liquid suspension). In some cases, more than one unit dosage form (e.g., two separate capsules or one capsule and a liquid suspension) constitutes a dose. For example, a single dose can be one unit dosage form, two dosage unit forms, three dosage unit forms, four unit dosage forms, five unit dosage forms, or more. In some cases, the number of unit dosage forms constituting a single dose is 1, 2, 3, 4, 5, 6, 7, 8, 9, 10, 11, 12, 13, 14, 15, 20, 25, or 30 unit dosage forms. A single dose can be, e.g., about 10³ to about 10⁹ CFUs, for example, about 10⁴ to about 10⁸ CFUs. In some embodiments, a dose is 1, 2, 3, or 4 capsules containing a total of between about 10² and about 10⁸ CFUs in the dose. In the case of a single dose having multiple dosage forms, the dosage forms are generally delivered within a prescribed period, e.g., within 1 hour, 2 hours, 5 hours, 10 hours, 15 hours, or 24 hours.

[0169] In some embodiments, a formulation described herein comprises at least one carbohydrate. A “carbohydrate” refers to a sugar or polymer of sugars. The terms “saccharide,” “polysaccharide,” “carbohydrate,” and “oligosaccharide” can be used interchangeably. Most carbohydrates are aldehydes or ketones with many hydroxyl groups, usually one on each carbon atom of the molecule. Carbohydrates generally have the molecular formula CₙH₂ₙOₙ. A carbohydrate can be a monosaccharide, a disaccharide, trisaccharide, oligosaccharide, or polysaccharide. The most basic carbohydrate is a monosaccharide, such as glucose, sucrose, galactose, mannose, ribose, arabinose, xylose, and fructose. Disaccharides are two joined monosaccharides. Exemplary disaccharides include sucrose, maltose, cellobiose, and lactose. Typically, an oligosaccharide includes between three and six monosaccharide units (e.g., raffinose, stachyose), and polysaccharides include six or more monosaccharide units. Exemplary polysaccharides include starch, glycogen, and cellulose. Carbohydrates can contain modified saccharide units such as 2′-deoxyribose wherein a hydroxyl group is removed, 2′-fluororibose wherein a hydroxyl group is replaced with a fluorine, or N-acetylglucosamine, a nitrogen-containing form of glucose (e.g., 2′-fluororibose, deoxyribose, and hexose). Carbohydrates can exist in many different forms, for example, conformers, cyclic forms, acyclic forms, stereoisomers, tautomers, anomers, and isomers.

[0170] In some embodiments, a formulation described herein comprises at least one lipid. As used herein a “lipid” includes fats, oils, triglycerides, cholesterol, phospholipids, fatty acids in any form including free fatty acids. Fats, oils and fatty acids can be saturated, unsaturated (cis or trans) or partially unsaturated (cis or trans). In some embodiments the lipid comprises at least one fatty acid selected from lauric acid (12:0), myristic acid (14:0), palmitic acid (16:0), palmitoleic acid (16:1), margaric acid (17:0), heptadecenoic acid (17:1), stearic acid (18:0), oleic acid (18:1), linoleic acid (18:2), linolenic acid (18:3), octadecatetraenoic acid (18:4), arachidic acid (20:0), eicosenoic acid (20:1), eicosadienoic acid (20:2), eicosatetraenoic acid (20:4), eicosapentaenoic acid (20:5) (EPA), docosanoic acid (22:0), docosenoic acid (22:1), docosapentaenoic acid (22:5), docosahexaenoic acid (22:6) (DHA), and tetracosanoic acid (24:0). In some embodiments, the formulation comprises at least one modified lipid, for example a lipid that has been modified by cooking.

[0171] In some embodiments, a formulation described herein comprises at least one supplemental mineral or mineral source. Examples of minerals include, without limitation: chloride, sodium, calcium, iron, chromium, copper, iodine, zinc, magnesium, manganese, molybdenum, phosphorus, potassium, and selenium. Suitable forms of any of the foregoing minerals include soluble mineral salts, slightly soluble mineral salts, insoluble mineral salts, chelated minerals, mineral complexes, non-reactive minerals such as carbonyl minerals, and reduced minerals, and combinations thereof.

[0172] In some embodiments, a formulation described herein comprises at least one supplemental vitamin. The at least one vitamin can be fat-soluble or water-soluble vitamins. Suitable vitamins include but are not limited to vitamin C, vitamin A, vitamin E, vitamin B12, vitamin K, riboflavin, niacin, vitamin D, vitamin B6, folic acid, pyridoxine, thiamine, pantothenic acid, and biotin. Suitable forms of any of the foregoing are salts of the vitamin, derivatives of the vitamin, compounds having the same or similar activity of the vitamin, and metabolites of the vitamin.

[0173] In some embodiments, a formulation described herein comprises an excipient. Non-limiting examples of suitable excipients include a buffering agent, a diluent, a preservative, a stabilizer, a binder, a compaction agent, a lubricant, a dispersion enhancer, a disintegration agent, a flavoring agent, a sweetener, a coloring agent, a glidant, and an anti-adherent.

[0174] In some embodiments, the excipient is a buffering agent. Non-limiting examples of suitable buffering agents include sodium citrate, magnesium carbonate, magnesium bicarbonate, calcium carbonate, and calcium bicarbonate.

[0175] In some embodiments, the excipient serves as a diluent. In such embodiments, the excipient can be a solid, semi-solid, or liquid material that acts as a vehicle, carrier, or medium for the active component (e.g., bacteria of the formulation disclosed herein). Thus, a formulation can be in the form of, e.g., a tablet, pill, powder, lozenge, sachet, cachet, elixir, suspension, emulsion, solution, syrup, aerosol (as a solid or in a liquid medium), ointment containing, for example, up to 10% by weight of the active component, soft capsule, hard capsule, gel-cap, tablet, suppository, solution, or packaged powder. In some cases, maximizing delivery of viable bacteria is enhanced by including gastro-resistant polymers, adhesion enhancers, or controlled release enhancers in a formulation.

[0176] In some embodiments, the excipient comprises a preservative. Non-limiting examples of suitable preservatives include antioxidants, such as alpha-tocopherol and ascorbate, and antimicrobials, such as parabens, chlorobutanol, and phenol.

[0177] In some embodiments, a formulation described herein comprises a binder as an excipient. Non-limiting examples of suitable binders include starches, pregelatinized starches, gelatin, polyvinylpyrolidone, cellulose, methylcellulose, sodium carboxymethylcellulose, ethylcellulose, polyacrylamides, polyvinyloxoazolidone, polyvinylalcohols, C12-C18 fatty acid alcohol, polyethylene glycol, polyols, saccharides, oligosaccharides, and combinations thereof.

[0178] In some embodiments, a formulation described herein comprises a lubricant as an excipient. Non-limiting examples of suitable lubricants include magnesium stearate, calcium stearate, zinc stearate, hydrogenated vegetable oils, sterotex, polyoxyethylene monostearate, talc, polyethyleneglycol, sodium benzoate, sodium lauryl sulfate, magnesium lauryl sulfate, and light mineral oil.

[0179] In some embodiments, a formulation described herein comprises a dispersion enhancer as an excipient. Non-limiting examples of suitable dispersants include starch, alginic acid, polyvinylpyrrolidones, guar gum, kaolin, bentonite, purified wood cellulose, sodium starch glycolate, isoamorphous silicate, and microcrystalline cellulose as high HLB emulsifier surfactants.

[0180] In some embodiments, a formulation described herein comprises a disintegrant as an excipient. In some embodiments, the disintegrant is a non-effervescent disintegrant. Non-limiting examples of suitable non-effervescent disintegrants include starches such as corn starch, potato starch, pregelatinized and modified starches thereof, sweeteners, clays, such as bentonite, micro-crystalline cellulose, alginates, sodium starch glycolate, gums such as agar, guar, locust bean, karaya, pectin, and tragacanth. In some embodiments, the disintegrant is an effervescent disintegrant. Non-limiting examples of suitable effervescent disintegrants include sodium bicarbonate in combination with citric acid, and sodium bicarbonate in combination with tartaric acid.

[0181] In some embodiments, the excipient comprises a flavoring agent. Flavoring agents can be chosen from synthetic flavor oils and flavoring aromatics; natural oils; extracts from plants, leaves, flowers, and fruits; and combinations thereof. In some embodiments, the flavoring agent is selected from cinnamon oils; oil of wintergreen; peppermint oils; clover oil; hay oil; anise oil; eucalyptus; vanilla; citrus oil such as lemon oil, orange oil, grape and grapefruit oil; and fruit essences including apple, peach, pear, strawberry, raspberry, cherry, plum, pineapple, and apricot.

[0182] In some embodiments, the excipient comprises a sweetener. Non-limiting examples of suitable sweeteners include glucose (corn syrup), dextrose, invert sugar, fructose, and mixtures thereof (when not used as a carrier); saccharin and its various salts such as the sodium salt; dipeptide sweeteners such as aspartame; dihydrochalcone compounds, glycyrrhizin; Stevia rebaudiana (Stevioside); chloro derivatives of sucrose such as sucralose; and sugar alcohols such as sorbitol, mannitol, sylitol, and the like. Also contemplated are hydrogenated starch hydrolysates and the synthetic sweetener 3,6-dihydro-6-methyl-1,2,3-oxathiazin-4-one-2,2-dioxide, particularly the potassium salt (acesulfame-K), and sodium and calcium salts thereof.

[0183] In some embodiments, a formulation described herein comprises a coloring agent. Non-limiting examples of suitable color agents include food, drug and cosmetic colors (FD&C), drug and cosmetic colors (D&C), and external drug and cosmetic colors (Ext. D&C). The coloring agents can be used as dyes or their corresponding lakes.

[0184] Additional suitable excipients include, for example, saline, phosphate buffered saline (PBS), cocoa butter, polyethylene glycol, polyalcohols (e.g., glycerol, sorbitol, or mannitol) and prebiotic oligosaccharides such as inulin, Crystalean® starch, or dextrin. Excipients can also be selected to account, at least in part, for the ability of the OTUs in a particular composition to withstand gastric pH (if being delivered orally or directly to the GI tract) and/or bile acids, or other conditions encountered by the formulation upon delivery to a subject (e.g., an ulcerative colitis patient).

[0185] The weight fraction of the excipient or combination of excipients in the formulation is usually about 99% or less, such as about 95% or less, about 90% or less, about 85% or less, about 80% or less, about 75% or less, about 70% or less, about 65% or less, about 60% or less, about 55% or less, 50% or less, about 45% or less, about 40% or less, about 35% or less, about 30% or less, about 25% or less, about 20% or less, about 15% or less, about 10% or less, about 5% or less, about 2% or less, or about 1% or less of the total weight of the formulation.

[0186] In preparing a formulation of the present disclosure, the formulation can be milled to provide the appropriate particle size prior to combining with the other ingredients, e.g., those described herein. In some embodiments, a bacterial composition is formulated so as to provide quick, sustained, or delayed release of the active component after administration to a subject, for example, for release in the colon, by employing methods and forms known in the art.

[0187] The bacterial compositions disclosed herein can be formulated into a variety of forms and administered by a number of different means. A bacterial composition can be administered orally, rectally, topically (e.g., ear instillation), nasally, intravaginally, or parenterally, in formulations containing conventionally acceptable carriers, adjuvants, and vehicles as desired. The term “parenteral” as used herein includes subcutaneous, intravenous, intramuscular, or intrasternal injection and infusion techniques. In an exemplary embodiment, the bacterial composition (e.g., formulated as described herein) is administered orally.

[0188] Solid dosage forms for oral administration include capsules, tablets, caplets, pills, troches, lozenges, powders, and granules. A capsule typically comprises a core material comprising a bacterial composition (e.g., that which has been formulated as described herein) and a shell wall that encapsulates the core material. In some embodiments the core material comprises at least one of a solid, a liquid, and an emulsion. In some embodiments the shell wall material comprises at least one of a soft gelatin, a hard gelatin, and a polymer. Suitable polymers include, but are not limited to: cellulosic polymers such as hydroxypropyl cellulose, hydroxyethyl cellulose, hydroxypropyl methyl cellulose (HPMC), methyl cellulose, ethyl cellulose, cellulose acetate, cellulose acetate phthalate, cellulose acetate trimellitate, hydroxypropylmethyl cellulose phthalate, hydroxypropylmethyl cellulose succinate and carboxymethylcellulose sodium; acrylic acid polymers and copolymers, such as those formed from acrylic acid, methacrylic acid, methyl acrylate, ammonio methylacrylate, ethyl acrylate, methyl methacrylate and/or ethyl methacrylate (e.g., those copolymers sold under the trade name “Eudragit”); vinyl polymers and copolymers such as polyvinyl pyrrolidone, polyvinyl acetate, polyvinylacetate phthalate, vinylacetate crotonic acid copolymer, and ethylene-vinyl acetate copolymers; and shellac (purified lac). In some embodiments at least one polymer functions as taste-masking agents.

[0189] Tablets, pills, and the like can be compressed, multiply compressed, multiply layered, and/or coated. The coating can be single or multiple. In some embodiments, the coating material comprises at least one of a saccharide, a polysaccharide, and glycoproteins extracted from at least one of a plant, a fungus, and a microbe. Non-limiting examples include corn starch, wheat starch, potato starch, tapioca starch, cellulose, hemicellulose, dextrans, maltodextrin, cyclodextrins, inulins, pectin, mannans, gum arabic, locust bean gum, mesquite gum, guar gum, gum karaya, gum ghatti, tragacanth gum, funori, carrageenans, agar, alginates, chitosans, or gellan gum. In some embodiments the coating material comprises a protein. In some embodiments the coating material comprises at least one of a fat and an oil. In some embodiments the at least one of a fat and an oil is high temperature melting. In some embodiments the at least one of a fat and an oil is hydrogenated or partially hydrogenated. In some embodiments the at least one of a fat and an oil is derived from a plant. In some embodiments the at least one of a fat and an oil comprises at least one of glycerides, free fatty acids, and fatty acid esters. In some embodiments the coating material comprises at least one edible wax. The edible wax can be derived from animals, insects, or plants. Non-limiting examples include beeswax, lanolin, bayberry wax, carnauba wax, and rice bran wax.

[0190] In some embodiments, a tablet or pill comprises an inner component surrounding the composition (e.g., which can be formulated as described herein) and an outer component, the latter serving as an envelope over the former. The two components can be separated by an enteric coating layer that can resist disintegration in the stomach and permits the inner component to pass intact into the duodenum or to be delayed in release.

[0191] Alternatively, powders or granules embodying a bacterial composition (e.g., which can be formulated as described herein) disclosed herein can be incorporated into a food product. In some embodiments, the food product is a drink for oral administration. Non-limiting examples of a suitable drink include fruit juice, a fruit drink, an artificially flavored drink, an artificially sweetened drink, a carbonated beverage, a sports drink, a liquid diary product, a shake, an alcoholic beverage, a caffeinated beverage, infant formula and so forth. Other suitable means for oral administration include aqueous and nonaqueous solutions, emulsions, suspensions and solutions and/or suspensions reconstituted from non-effervescent granules, containing at least one of suitable solvents, preservatives, emulsifying agents, suspending agents, diluents, sweeteners, coloring agents, and flavoring agents.

[0192] In some embodiments, the food product is a solid foodstuff. Suitable examples of a solid foodstuff include without limitation a food bar, a snack bar, a cookie, a brownie, a muffin, a cracker, an ice cream bar, a frozen yogurt bar, and the like.

[0193] In some embodiments, a bacterial composition disclosed herein (e.g., which can be formulated as described herein) is incorporated into a therapeutic food. In some embodiments, the therapeutic food is a ready-to-use food that optionally contains some or all essential macronutrients and micronutrients. In some embodiments, a bacterial composition disclosed herein (e.g., which can be formulated as described herein) is incorporated into a supplementary food that is designed to be blended into an existing meal. In some embodiments, the supplemental food contains some or all essential macronutrients and micronutrients. In some embodiments, a bacterial composition disclosed herein (e.g., which can be formulated as described herein) is blended with or added to an existing food to fortify the food's protein nutrition. Examples include food staples (grain, salt, sugar, cooking oil, margarine), beverages (coffee, tea, soda, beer, liquor, sports drinks), snacks, sweets and other foods.

[0194] In some embodiments, the formulations are filled into gelatin capsules for oral administration. An example of an appropriate capsule is a 250 mg gelatin capsule containing from 10 (up to 100 mg) of lyophilized powder (10⁸ to 10¹¹ bacteria), 160 mg microcrystalline cellulose, 77.5 mg gelatin, and 2.5 mg magnesium stearate. In other embodiments, from about 10⁵ to about 10¹² bacteria can be used, about 10⁵ to about 10⁷, about 10⁶ to about 10⁷, or about 10⁸ to about 10¹⁰, with attendant adjustments of the excipients if necessary. In further embodiments, an enteric-coated capsule or tablet or with a buffering or protective composition can be used. The use of enteric polymers (such as those used to coat a capsule or tablet described herein) can be useful when formulating a bacterial composition disclosed herein for oral administration. In certain embodiments, the enteric polymers allow for more efficient delivery of the bacterial compositions disclosed herein to a subject's gastrointestinal tract. In some embodiments, the enteric-coated capsule or tablet release their contents (i.e., bacteria or combinations of bacteria disclosed herein) when the pH becomes alkaline after the enteric-coated capsule or tablet passes through the stomach. When a pH sensitive composition (e.g., enteric polymers) is used for formulating the bacterial composition, the pH sensitive composition is a polymer whose pH threshold of the decomposition of the composition is about 6.8 to about 7.5. In some aspects, the pH threshold range can be lower, e.g., about 5.5 or about 6.0, or higher, e.g., about 7.0 or about 8.0. Such a numeric value range is a range where the pH shifts toward the alkaline side at a distal portion of the stomach, and hence is a suitable range for use in the delivery to the colon. Thus, the pH threshold range can be about 5.0 to about 8.0, about 5.5 to about 8.0, about 6.0 to about 8.0, about 6.5 to about 8.0, about 5.0 to about 7.5, about 5.5 to about 7.5, about 6.0 to about 7.5, about 6.5 to about 7.5, about to about 7.0, about 5.5 to about 7.0, about 6.0 to about 7.0, about 6.5 to about 7.0, or a range between any two preceding values.

[0195] Moreover, an approach to improving delivery of a bacterial composition disclosed herein (e.g., which can be formulated as described herein) to the colon specifically can include a composition which ensures the delivery to the gastrointestinal tract by delaying the release of the contents by approximately 3 to 5 hours, which corresponds to the small intestinal transit time. In some aspects, the delayed release of the contents of the formulation is about 1 to about 8 hours, about 1 to about 7 hours, about 1 to about 6 hours, about 1 to about 5 hours, about 1 to about 4 hours, about 1 to about 3 hours, about 1 to about 2 hours, about 2 to 8 hours, about 2 to about 7 hours, about 2 to about 6 hours, about 2 to about 5 hours, about 2 to about 4 hours, about 2 to about 3 hours, about 3 to 8 hours, about 3 to about 7 hours, about 3 to 6 hours, about 3 to about 5 hours, about 3 to about 4 hours, about 4 to about 8 hours, about 4 to about 7 hours, about 4 to about 6 hours, about 4 to about 5 hours, about 5 to about 8 hours, about 5 to about 7 hours, about to about 6 hours, about 6 to about 8 hours, about 6 to about 7 hours, about 7 to about 8 hours, or a range between any two preceding values. In an example of formulating a pharmaceutical preparation comprising the composition for delaying the release, a hydrogel is used as a shell. The hydrogel is hydrated and swells upon contact with gastrointestinal fluid, so that the contents are effectively released. Furthermore the delayed release dosage units include drug-containing compositions having a material which coats or selectively coats a drug. Examples of such a selective coating material include in vivo degradable polymers, gradually hydrolyzable polymers, gradually water-soluble polymers, and/or enzyme degradable polymers. A preferred coating material for efficiently delaying the release is not particularly limited, and examples thereof include cellulose-based polymers such as hydroxypropyl cellulose, acrylic acid polymers and copolymers such as methacrylic acid polymers and copolymers, and vinyl polymers and copolymers such as polyvinylpyrrolidone.

[0196] Additional compositions that target delivery to the colon include bioadhesive compositions which specifically adhere to the colonic mucosal membrane (for example, a polymer described in the specification of U.S. Pat. No. 6,368,586), and compositions into which a protease inhibitor is incorporated for protecting particularly a bacterial composition disclosed herein (e.g., which can be formulated as described herein) in the gastrointestinal tracts from decomposition due to an activity of a protease.

[0197] An additional colon-delivery mechanism is via pressure change, such that the contents are released from the colon by generation of gas in bacterial fermentation at a distal portion of the stomach. Such pressure-change is not particularly limited, and a more specific example thereof is a capsule which has contents dispersed in a suppository base and which is coated with a hydrophobic polymer (for example, ethyl cellulose).

[0198] A further composition for delivery to the colon includes, for example, a bacterial composition disclosed herein (e.g., which can be formulated as described herein) comprising a component that is sensitive to an enzyme (for example, a carbohydrate hydrolase or a carbohydrate reductase) present in the colon. Such a composition is not particularly limited, and more specific examples thereof include compositions that use food components such as non-starch polysaccharides, amylose, xanthan gum, and azopolymers.

[0199] In some embodiments, a bacterial composition disclosed herein is formulated with a germinant to enhance engraftment or efficacy. In some embodiments, a bacterial composition is formulated or administered with a prebiotic substance to enhance engraftment or efficacy.

[0200] In some embodiments, the number of bacteria of each type can be present in the same level or amount or in different levels or amounts. For example, in a bacterial composition (e.g., which can be formulated as described herein) with two types of bacteria, the bacteria can be present in from about a 1:10,000 ratio to about a 1:1 ratio, from about a 1:10,000 ratio to about a 1:1,000 ratio, from about a 1:1,000 ratio to about a 1:100 ratio, from about a 1:100 ratio to about a 1:50 ratio, from about a 1:50 ratio to about a 1:20 ratio, from about a 1:20 ratio to about a 1:10 ratio, from about a 1:10 ratio to about a 1:1 ratio, or a range between any two preceding values. For bacterial compositions (e.g., which can be formulated as described herein) comprising at least three types of bacteria, the ratio of type of bacteria can be chosen pairwise from ratios for bacterial compositions with two types of bacteria. For example, in a bacterial composition (e.g., which can be formulated as described herein) comprising bacteria A, B, and C, at least one of the ratio between bacteria A and B, the ratio between bacteria B and C, and the ratio between bacteria A and C can be chosen, independently, from the pairwise combinations above.

### III. Methods of Treating a Subject

[0201] The compositions and formulations disclosed herein can be used for the treatment and/or prevention of a disease or disorder, such as those associated with dysbiosis of a gastrointestinal tract (e.g., infection or GvHD following HSCT), e.g., by ameliorating one or more signs or symptoms of the disease. The bacterial compositions disclosed herein (e.g., which can be formulated as described herein) can also be useful for the treatment of diseases or disorders, including but not limited to acute leukemia (ALL), acute myelogenous leukemia (AML), multiple myeloma and lymphomas (NHL and HD), MDS (combined with MPNs) and related cancers that require HSCT, mucositis, infections including but not limited to blood and tissue infection with ESKAPE pathogens (including: Enterococcus faecium, Staphylococcus aureus, Klebsiella pneumoniae, Acinetobacter baumannii, Pseudomonas aeruginosa, and Enterobacter spp.), with Enterococcus species including but not limited to Enterococcus faecalis and Enterococcus faecium, Enterobacteriaceae species including but not limited to Klebsiella pneumonia, or such species that are resistant to vancomycin or carbapenems, with drug resistant or multi-drug resistant organisms (MDROs) including VRE, CRE (including Klebsiella pneumoniae, Klebsiella oxytoca, Klebsiella aerogenes, Enterococcus species), with drug resistant or multi-drug resistant Enterobacteriaceae, with extended spectrum beta-lactamase (ESBLs) producing bacteria (including E. coli, Klebsiella species), or with methicillin-resistant Staphylococcus aureus (MRSA), patients at risk for infectious disease, including for example, patients in intensive care units and long-term care, treatment and prevention of C. difficile infection (CDI), as well as recurrent CDI, immune check point inhibitor-induced (ICI) colitis, viral infection and reactivation, and fungal infection, including gastrointestinal infection and systemic, e.g., candidemia, etc.). The bacterial compositions (e.g., which can be formulated as described herein) disclosed herein can further be useful for treatment of diseases or disorders, including those described in International Publication No. WO 2019/227085, which is incorporated by reference herein.

[0202] The terms “treat,” “treating,” and “treatment,” as used herein, refer to any type of intervention or process performed on, or administering an active agent to, the subject with the objective of reversing, alleviating, ameliorating, inhibiting, or slowing down or preventing the progression, development, severity or recurrence of a symptom, complication, condition or biochemical indicia associated with a disease or enhancing overall survival. Treating can include reducing at least one sign or symptom associated with a disease or disorder disclosed herein, e.g., infection or GvHD following HSCT. Treatment can be of a subject having a disease or a subject who does not have a disease (e.g., for prophylaxis). It is understood that “preventing” can mean reducing the risk of disease or reducing the rate of relapse.

[0203] In some embodiments, treatment with a bacterial composition described herein is associated with at least one of the following: (i) an increase in the diversity of the gastrointestinal (GI) microbiome in a subject, (ii) a reduction in GI inflammation in a subject, (iii) improvement in mucosal and/or epithelial barrier integrity in a subject compared to a reference control (e.g., untreated patients or the subject prior to treatment), (iv) promotion of mucosal healing, (v) reduction in incidence of infection, (vi) reduction in the use of antibiotics, (vii) increase in the probability of survival, (viii) reduction in relapse of primary cancer, and (ix) other improvements of at least one sign or symptom of a disease or disorder disclosed herein. In some embodiments, improvement associated with an increase in the diversity of the gastrointestinal (GI) microbiome in a subject includes improvement measured by species domination, including, for example, by pathobionts, drug resistant organisms, or MDROs, or as measured by an increase in diversity of species such as in the number of species (e.g., species richness) and/or species distribution (e.g., even skew of distribution). Such improvements can also include, for example, improvements detected via biomarkers, such as a decrease or increase in the level of certain biological molecules (e.g., fecal calprotectin, secondary bile acids, tryptophan metabolites, or short-chain and medium-chain fatty acids) following treatment. Formulations disclosed herein (e.g., comprising a designed bacterial composition) can be used to treat any disease or disorder associated with a dysbiosis of the gastrointestinal tract. Non-limiting examples of such diseases or disorders are provided throughout the present disclosure.

[0204] Formulations as described herein are useful for administration to a subject, e.g., a mammal, such as a human in need of treatment, e.g., to prevent or treat a disease or disorder disclosed herein or a sign or symptom of a disease or disorder disclosed herein or to prevent recurrence of a disease or disorder disclosed herein. In some embodiments, the mammalian subject is a human subject. In some embodiments, the human subject (e.g., patient) has one or more signs or symptoms of a disease or disorder, such as those associated with infection (including, but not limited to, blood stream infection, sepsis, tissue infection, invasive infection, viral infection or reactivation, and gastrointestinal infection including but not limited to C. difficile, graft-versus-host-disease (GvHD) including acute or chronic GvHD, relapse of cancer, or mucositis). A therapeutically effective treatment using a formulation provided herein can ameliorate one or more of such signs and symptoms of a disease or disorder disclosed herein. In some embodiments, the signs and symptoms of a disease or disorder disclosed can be febrile neutropenia, defined as a temperature ≥38.0° C. (100.4° F.) concurrent with absolute neutrophil count (ANC)<500 cells/mm³ in the absence of an identified infectious agent.

[0205] Efficacy of a treatment can be determined by evaluating signs and/or symptoms and according to whether induction of improvement and/or maintenance of an improved condition is achieved, e.g., for at least about 1 week, at least about two weeks, at least about three weeks, at least about four weeks, at least about 8 weeks, or at least about 12 weeks.

[0206] Other indicators of efficacy of a therapeutic composition and/or method for treating a disease or disorder, such as those associated with dysbiosis include engraftment of at least one bacterial species or OTU identified in a microbiome composition, for example, at about 2 weeks, about 3 weeks, about 4 weeks, about 5 weeks, about 6 weeks, about 7 weeks, about 8 weeks, about 9 weeks, about 10 weeks, about 11 weeks, about 12 weeks, or longer after initial dosing with the microbiome composition. In some embodiments, the indicators of efficacy of a therapeutic composition and/or method for treating a disease or disorder, such as those associated with dysbiosis include the reduced abundance of at least one species or OTU identified herein (e.g., ESKAPE pathogens including: Enterococcus faecium, Staphylococcus aureus, Klebsiella pneumoniae, Acinetobacter baumannii, Pseudomonas aeruginosa, and Enterobacter spp. or pathogens related to gastrointestinal infections, including Clostridioides difficile, viral, and parasitic infections), for example, at about 2 weeks, about 3 weeks, about 4 weeks, about 5 weeks, about 6 weeks, about 7 weeks, about 8 weeks, about 9 weeks, about 10 weeks, about 11 weeks, about 12 weeks, or longer after initial dosing with the microbiome composition. In some embodiments, the indicators of efficacy of a therapeutic composition and/or method for treating a disease or disorder, such as those associated with dysbiosis include the reduced abundance of at least one species or OTU identified herein (e.g., Enterococcus spp. and Enterobacteriaceae spp. in stool, drug resistant or multi-drug resistant organisms (MDROs) including vancomycin-resistant enterococci (VRE), carbapenem-resistant Enterobacteriaceae (CRE), drug resistant or multi-drug resistant Enterobacteriaceae, methicillin resistant Staphylococcus aureus (MRSA), and organisms that produce extended-spectrum beta-lactamase (ESBL)), for example, at about 2 weeks, about 3 weeks, about 4 weeks, about 5 weeks, about 6 weeks, about 7 weeks, about 8 weeks, about 9 weeks, about 10 weeks, about 11 weeks, about 12 weeks, or longer after initial dosing with the microbiome composition.

[0207] In some embodiments, treatment with a formulation disclosed herein can improve a dysbiosis, including, but not limited to, an improvement in the representation of one or more OTUs identified as reduced in a population of subjects suffering from a disease or disorder associated with dysbiosis (e.g., patients following HSCT with active disease). In some embodiments, treatment with a formulation of the present disclosure can reduce the representation of one or more microbial species that are associated with a disease or disorder disclosed herein.

[0208] In some embodiments, treatment with a formulation disclosed herein can increase the representation of microbial species that are associated with an improvement (e.g., reducing the risk of infection or GvHD) of a disease or disorder disclosed herein. In some embodiments, the improvement of a disease or disorder can be improvement on overall survival (OS), the incidence and duration of survival endpoints including transplant-related mortality (TRM), relapse free survival (RFS), GvHD-free survival (GFS), and GvHD- and relapse-Free survival (GRFS), the frequency and length of hospitalizations and Intensive Care Unit (ICU) stays, or incidence and severity of chronic Graft-versus-Host Disease (cGvHD). In some embodiments the improvement of a disease or disorder can be assessed through biomarkers comprising the urinary concentration of products of amino acid metabolism such as 3-indoxyl sulfate (3-IS), stool biomarkers, including but not limited to calprotectin or lipocalin, and plasma immunologic mediators during the treatment period including circulating markers of aGvHD, suppression of tumorigenicity 2 (ST2), regenerating islet-derived 3α (REG3α), cytokines, or T cell subsets in plasma at various timepoints through Week 14 (End of Treatment).

[0209] In some embodiments, subjects that have undergone or are undergoing transplantation and administered the bacterial compositions or pharmaceutical formulations thereof have i) an increased prevalence in their stool of one or more strains in the bacterial composition, ii) a decreased abundance in their stool of Enterococcus spp., Enterobacteriaceae spp., or both, iii) a decreased incidence of bloodstream infections including but not limited to bacterial infections (VRE, CRE, or ESBL), fungal infections, or combinations thereof, iv) a decreased incidence of gastrointestinal infections including but not limited to Clostridiodes difficile, viral infections or reactivations (including but not limited to norovirus, adenovirus, or rotavirus), parasitic infections (including but not limited to Cryptosporidia), or combinations thereof, v) a decreased incidence of acute GvHD including but not limited to acute GvHD Grades II, III, and IV, vi) a decreased incidence of febrile neutropenia, vii) reduced frequency, length, or both frequency and length of hospitalization stay, or vii) any combination thereof, relative to a reference (e.g., a corresponding reference in a subject that did not receive the composition disclosed herein or corresponding reference in the subject prior to the administration of the composition).

[0210] In some embodiments, a subject receives a pretreatment protocol prior to administration of the formulation, wherein the pretreatment protocol prepares the gastrointestinal tract to receive the bacterial composition. In certain embodiments, the pretreatment protocol comprises an oral antibiotic treatment, wherein the antibiotic treatment alters the bacteria in the patient. In specific embodiments, the antibiotic is not absorbed through the gut or minimally bioavailable for systemic distribution. In other embodiments, the pretreatment protocol comprises a colonic cleansing (e.g., enema), wherein the colonic cleansing substantially empties the contents of the patient's colon. As used herein, “substantially emptying the contents of the colon” refers to removal of at least about 75%, at least about 80%, at least about 90%, at least about 95%, or about 100% of the contents of the ordinary volume of colon contents. In certain embodiments, the subject receives more than one pretreatment protocol, e.g., an antibiotic treatment preceding a colon-cleansing protocol.

[0211] In some embodiments, a subject does not receive a pretreatment protocol prior to administration of the formulation. Instead, the formulations as described herein are administered to reduce, alleviate, or prevent intestinal dysbiosis associated with subsequent treatment of the subject for a disease or disorder requiring treatment (e.g., allogeneic or autologous HSCT). In some embodiments, a subject receives a pretreatment protocol prior to administration of the formulations as described herein and the subject receives subsequent treatment for a disease or disorder requiring treatment (e.g., allogeneic or autologous HSCT) following administration of the formulations as described herein.

[0212] In some embodiments, a pretreatment protocol is administered to a subject at least 1 day, 2 days, 3 days, 5 days, 6 days, 7 days, 10 days, or 15 days prior to administration of a formulation described herein. In some embodiments, subsequent treatment of the subject for a disease or disorder requiring treatment (e.g., allogeneic or autologous HSCT) occurs at least 1 day, 2 days, 3 days, 5 days, 6 days, 7 days, 10 days, or 15 days after administration of a formulation described herein. In some embodiments, the subject receives multiple doses of a formulation. In some embodiments, the subject receives multiple doses of a formulation through a course of 1, 2, 3, 4, 5, 6, 7, 8, 9, 10, 11, 12, 13, 14, 15, 16, 17, 18, 19 or 20 days. In some embodiments, the subject receives at least 1, 2, 3, 4, 5, 6, 7, 8, 9 or 10 courses. In some embodiments, the subject has at least one sign or symptom of a disease or disorder, such as those disclosed herein prior to administration of the formulation. In other embodiments, the subject does not exhibit a sign or symptom of a disease or disorder, such as those disclosed herein prior to administration of the formulation, e.g., formulation is administered prophylactically to reduce the risk of a sign or symptom of a disease or disorder, such as those disclosed herein.

[0213] In some embodiments, a formulation described herein is administered enterically, in other words, by a route of access to the gastrointestinal tract. This includes oral administration, rectal administration (including enema, suppository, or colonoscopy), by an oral or nasal tube (nasogastric, nasojejunal, oral gastric, or oral jejunal), or any other method known in the art.

[0214] In some embodiments, a formulation is administered to at least one region of the gastrointestinal tract, including the mouth, esophagus, stomach, small intestine, large intestine, and rectum. In other embodiments, a formulation is administered to all regions of the gastrointestinal tract. In certain embodiments, a formulation is administered orally in the form of medicaments such as powders, capsules, tablets, gels or liquids. The formulation can also be administered in gel or liquid form by the oral route or through a nasogastric tube, or by the rectal route in a gel or liquid form, by enema or instillation through a colonoscope or by a suppository.

[0215] In some embodiments, the bacteria and bacterial compositions are provided in a dosage form. In some embodiments, the dosage form is designed for administration of at least one OTU or combination thereof disclosed herein, wherein the total amount of bacterial composition administered is selected from about 0.1 ng to about 10 g, about 10 ng to about 1 g, about 100 ng to about 0.1 g, about 0.1 mg to about 500 mg, about 1 mg to about 1000 mg, from about 1000 to about 5000 mg, or more. In some embodiments, the bacteria and bacterial compositions are provided in a single dosage form comprising a capsule. In some embodiments, the bacteria and bacterial compositions are provided in a single dosage form comprising at least one capsule, at least two capsules, at least three capsules, at least three capsules, at least four capsules, at least five capsules, at least six capsules, at least seven capsules, at least eight capsules, at least nine capsules, or at least ten capsules. In some embodiments, the capsule comprise a liquid formulation of bacterial spores from a strain delivered at a target dose strength of about 1×10⁶ to about 5×10⁷ colony-forming units (CFUs) per dose. In some embodiments, the capsule comprise a liquid formulation of bacterial spores from 1, 2, 3, 4, 5, 6, 7, 8, 9, 10, 11, 12, 13, 14, 15, 16, 17, 18, 19 or 20 strains delivered at a target dose strength of about 1×10⁶ to about 5×10⁷ colony-forming units (CFUs) per dose. In some embodiments, the capsule comprise a dry powder formulation of bacterial spores from a strain delivered at a target dose strength of about 1×10⁶ to about 5×10⁷ colony-forming units (CFUs) per dose. In some embodiments, the capsule comprise a dry powder formulation of bacterial spores from 1, 2, 3, 4, 5, 6, 7, 8, 9, 10, 11, 12, 13, 14, 15, 16, 17, 18, 19 or 20 strains delivered at a target dose strength of about 1×10⁶ to about 5×10⁷ colony-forming units (CFUs) per dose.

[0216] In some embodiments, the treatment period is at least about 1 day, at least about 2 days, at least about 3 days, at least about 4 days, at least about 5 days, at least about 6 days, at least about 1 week, at least about 2 weeks, at least about 3 weeks, at least about 4 weeks, at least about 1 month, at least about 2 months, at least about 3 months, at least about 4 months, at least about 5 months, at least about 6 months, or at least about 1 year. In some embodiments, the treatment period is from about 1 day to 1 week, from about 1 week to 4 weeks, from about 1 month, to 3 months, from about 3 months to 6 months, from about 6 months to 1 year, or for over a year.

[0217] In some embodiments, from about 10⁵ and about 10¹² microorganisms total is administered to the patient in a given dosage form. In certain embodiments, an effective amount can be provided in from about 1 to about 500 ml or from about 1 to about 500 grams of the bacterial composition having from about 10⁵ to about 10¹¹ bacteria per ml or per gram, or a capsule, tablet, powder, or suppository having from about 1 mg to about 1000 mg lyophilized powder having from about 10⁵ to about 10¹¹ bacteria. In some embodiments, those receiving acute treatment receive higher doses than those who are receiving chronic administration (such as hospital workers or those admitted into long-term care facilities).

[0218] In some embodiments, a formulation described herein is administered once, on a single occasion or on multiple occasions, such as once a day for several days or more than once a day on the day of administration (including twice daily, three times daily, or up to five times daily). In some embodiments, a formulation is administered intermittently according to a set schedule, e.g., once a day, once weekly, or once monthly, or when the patient relapses from clinical improvement of a disease or disorder, such as those disclosed herein, or exhibits a sign or symptoms of a disease or disorder, such as those disclosed herein. In other embodiments, a formulation is administered on a long-term basis to individuals who are at risk for active disease or disorder, such as those disclosed herein or are diagnosed as being at risk for developing a disease or disorder (e.g., have a family history of the diseases or a history of isotretinoin use by the individual).

[0219] In some embodiments, a bacterial composition of the present disclosure (e.g., which can be formulated as described herein) is administered with other agents (e.g., anti-microbial agents or prebiotics) as a combination therapy mode. In some embodiments, a bacterial composition of the present disclosure (e.g., which can be formulated as described herein) is administered without other agents (e.g., anti-microbial agents or prebiotics).

[0220] In some embodiments, a bacterial composition as described herein (e.g., which can be formulated as described herein) is administered with other agents where the other agent (e.g., anti-microbial agents or prebiotics) is administered before, for example, one day, two days, three days, four days, five days, six days, seven days, or more than seven days, the bacterial composition. In some embodiments, the bacterial composition (e.g., which can be formulated as described herein) is then administered over several days, for example, one day, two days, three days, four days, five days, six days, seven days, eight days, nine days, ten days, or more. In some embodiments, the other agent (e.g., anti-microbial agents or prebiotics) is administered, for example, for one day, two days, three days, four days, five days, six days, seven days, or more than seven days, followed by administration of a bacterial composition as described herein over several days, for example, one day, two days, three days, four days, five days, six days, seven days, eight days, nine days, ten days, or more. In some embodiments, the other agent (e.g., anti-microbial agents or prebiotics) is administered over a period of four days followed by administration of a bacterial composition as described herein (e.g., which can be formulated as described herein) over ten days.

[0221] In some embodiments, a bacterial composition as described herein (e.g., which can be formulated as described herein) is administered before HSCT, after HSCT, or after administration of, e.g., anti-bacterial agents, following HSCT, and combinations thereof. In some embodiments, a bacterial composition as described herein is administered before HSCT, after HSCT, and after administration of, e.g., anti-bacterial agents, following HSCT

[0222] In some embodiments, a bacterial composition (e.g., which can be formulated as described herein) is included in combination therapy with one or more anti-microbial agents, which include anti-bacterial agents, anti-fungal agents, anti-viral agents and anti-parasitic agents.

[0223] Anti-bacterial agents include cephalosporin antibiotics (cephalexin, cefuroxime, cefadroxil, cefazolin, cephalothin, cefaclor, cefamandole, cefoxitin, cefprozil, and ceftobiprole); fluoroquinolone antibiotics (cipro, Levaquin, floxin, tequin, avelox, and norflox); tetracycline antibiotics (tetracycline, minocycline, oxytetracycline, and doxycycline); penicillin antibiotics (amoxicillin, ampicillin, penicillin V, dicloxacillin, carbenicillin, vancomycin, and methicillin); and carbapenem antibiotics (ertapenem, doripenem, imipenem/cilastatin, and meropenem). In certain aspects, the anti-bacterial agent is vancomycin.

[0224] Anti-viral agents include Abacavir, Acyclovir, Adefovir, Amprenavir, Atazanavir, Cidofovir, Darunavir, Delavirdine, Didanosine, Docosanol, Efavirenz, Elvitegravir, Emtricitabine, Enfuvirtide, Etravirine, Famciclovir, Foscarnet, Fomivirsen, Ganciclovir, Indinavir, Idoxuridine, Lamivudine, Lopinavir Maraviroc, MK-2048, Nelfinavir, Nevirapine, Penciclovir, Raltegravir, Rilpivirine, Ritonavir, Saquinavir, Stavudine, Tenofovir Trifluridine, Valaciclovir, Valganciclovir, Vidarabine, Ibacitabine, Amantadine, Oseltamivir, Rimantidine, Tipranavir, Zalcitabine, Zanamivir and Zidovudine.

[0225] Examples of antifungal compounds include, but are not limited to polyene antifungals such as natamycin, rimocidin, filipin, nystatin, amphotericin B, candicin, and hamycin; imidazole antifungals such as miconazole, ketoconazole, clotrimazole, econazole, omoconazole, bifonazole, butoconazole, fenticonazole, isoconazole, oxiconazole, sertaconazole, sulconazole, and tioconazole; triazole antifungals such as fluconazole, itraconazole, isavuconazole, ravuconazole, posaconazole, voriconazole, terconazole, and albaconazole; thiazole antifungals such as abafungin; allylamine antifungals such as terbinafine, naftifine, and butenafine; and echinocandin antifungals such as anidulafungin, caspofungin, and micafungin. Other compounds that have antifungal properties include, but are not limited to polygodial, benzoic acid, ciclopirox, tolnaftate, undecylenic acid, flucytosine or 5-fluorocytosine, griseofulvin, and haloprogin.

[0226] In some embodiments, a bacterial composition (e.g., which can be formulated as described herein) is included in combination therapy with one or more corticosteroids, mesalazine, mesalamine, sulfasalazine, sulfasalazine derivatives, immunosuppressive drugs, cyclosporin A, mercaptopurine, azathiopurine, prednisone, methotrexate, antihistamines, glucocorticoids, epinephrine, theophylline, cromolyn sodium, anti-leukotrienes, anti-cholinergic drugs for rhinitis, anti-cholinergic decongestants, mast-cell stabilizers, monoclonal anti-IgE antibodies, vaccines, and combinations thereof.

[0227] A prebiotic is a selectively fermented ingredient that allows specific changes, both in the composition and/or activity in the gastrointestinal microbiota that confers benefits upon a treated subject's well-being and health. Prebiotics can include complex carbohydrates, amino acids, peptides, or other nutritional components that allow bacterial composition benefits such as better survival, fitness, enhanced engraftment, enhanced competition with resident bacteria or pathobionts or pathogens. Prebiotics include, but are not limited to, amino acids, biotin, fructooligosaccharide, galactooligosaccharides, inulin, lactulose, mannan oligosaccharides, oligofructose-enriched inulin, oligofructose, oligodextrose, tagatose, trans-galactooligosaccharide, and xylooligosaccharides.

[0228] To evaluate a subject, signs or symptoms of an adverse event or disease recurrence are evaluated post-treatment ranging from, e.g., about 1 day to about 6 months after administration of a formulation. One method of evaluation involves obtaining fecal material from the subject and assessment of microbes present in the gastrointestinal tract, e.g., using 16S rDNA or metagenomic shotgun sequencing analysis or other analyses known in the art. Population of the gastrointestinal tract by bacterial species present in the formulation as well as augmentation by commensal microbes not present in the formulation can be used to indicate an improvement in the GI dysbiosis associated with e.g., an infection or GvHD following HSCT, and therefore a decreased risk of an adverse event or a decrease in the severity of an adverse event.

[0229] In addition to treating the different inflammatory diseases disclosed herein (e.g., an infection or GvHD following HSCT), applicant has surprisingly discovered that the designed compositions disclosed herein can be also used to treat diseases or disorders that are generally not associated with pro-inflammatory responses. A non-limiting example of such a disease or disorder is cancer. In some embodiments, the bacterial compositions disclosed herein (e.g., designed compositions) can be used to treat certain cancers, e.g., when administered in combination with other anti-cancer agents. Without being limited to any one particular theory, the compositions disclosed herein are designed to have functional features that target multiple biological pathways. In some embodiments, the functional features are important for the treatment of inflammatory diseases. In other embodiments, the functional features are important for the treatment of cancers. In certain embodiments, the functional features are important for the treatment of both inflammatory diseases and cancers. Non-limiting examples of functional features that can be important for the treatment of both inflammatory diseases and cancers include, but are not limited to, inhibition of HDAC activity, production of short-chain fatty acids, production of medium chain fatty acids, production of tryptophan metabolites, protection of epithelial barrier integrity, inhibition of apoptosis (e.g., which is capable of restoring epithelial barrier integrity after transplant preconditioning), downmodulating one or more genes induced in IFN-γ treated colonic organoids (e.g., those associated with inflammatory chemokine signaling, NF-κB signaling, TNF family signaling, type I interferon signaling, type II interferon signaling, TLR signaling, lymphocyte trafficking, Th17 cell differentiation, Th2 differentiation, apoptosis, inflammasomes, autophagy, oxidative stress, MEW class I and II antigen presentation, complement, mTor, nod-like receptor signaling, PI3K signaling, or combinations thereof), production of IL-18, activation of human CD8 T cells by metabolites (e.g., short-chain fatty acids) or macromolecules, activation of antigen presenting cells such as dendritic cells by bacterial antigens, macromolecules and metabolites, or reduced colonic inflammation (e.g., through promoting immune homeostasis in the colon and via upregulation of Tregs and counterbalancing inflammatory cell populations such as Th1, Th17, and activated human CD8 T cells), reducing expression of one or more inhibitory receptors (e.g., TIGIT, TIM-3, or LAG-3) on human CD8+ T cells, increasing expression of one or more genes/proteins associated with T cell activation and/or function (e.g., CD45RO, CD69, IL-24, TNF-α, perforin, or IFN-γ), enhancing the ability of human CD8+ T cells to kill tumor cells, enhancing the efficacy of an immune checkpoint inhibitor, or enabling recruitment of human CD8 T cells to tumors located distally.

[0230] In some embodiments, a designed composition disclosed herein is administered in combination with an additional therapeutic agent used for the treatment of cancers. Such additional therapeutic agents can include, for example, chemotherapy drugs, small molecule drugs or antibodies that stimulate the immune response to a given cancer. In some instances, therapeutic compositions can include an immune checkpoint inhibitor, e.g., an anti-PD-1 antibody, an anti-PD-L1 antibody, or an anti-CTLA-4 antibody. Non-limiting examples of other antibodies that can be used in combination with the designed compositions of the present disclosure include an anti-OX40 (also known as CD134, TNFRSF4, ACT35 and/or TXGP1L) antibody, an anti-CD137 antibody, an anti-LAG-3 antibody, or an anti-GITR antibody.

[0231] In some embodiments, a designed composition disclosed herein, when administered in combination with an anti-cancer agent (e.g., immune checkpoint inhibitor, e.g., anti-PD-1 antibody or an anti-PD-L1 antibody), can reduce tumor volume in a subject. In certain embodiments, tumor volume is decreased by at least about 10%, at least about 20%, at least about 30%, at least about 40%, at least about 50%, at least about 60%, at least about 70%, at least about 80%, or at least about 90% in the subject, compared to a reference (e.g., tumor volume in the subject prior to the administration or a corresponding subject that did not receive the compositions disclosed herein).

[0232] In some embodiments, a designed composition disclosed herein, when administered in combination with an anti-cancer agent (e.g., immune checkpoint inhibitor, e.g., anti-PD-1 antibody or an anti-PD-L1 antibody), can increase the percentage of CD8 T cells and/or CD4 T cells (tumor infiltrating lymphocytes) in the tumor of a subject. In some embodiments, the percentage of CD8 T cells and/or CD4 T cells in the tumor is increased by at least about 5%, at least about 10%, at least about 20%, at least about 30%, at least about 40%, at least about 50%, at least about 60%, at least about 70%, at least about 80%, or at least about 90% in the subject, compared to a reference (e.g., percentage of CD8 T cells and/or CD4 T cells in the tumor in the subject prior to the administration or a corresponding subject that did not receive the compositions disclosed herein). As a result of the increase in the percentage of CD8 T cells, in some embodiments, the ratio of CD8 T cells to regulatory T cells in the tumor is increased, e.g., by at least about 5%, at least about 10%, at least about 20%, at least about 30%, at least about 40%, at least about 50%, at least about 60%, at least about 70%, at least about 80%, or at least about 90% in the subject, compared to a reference (e.g., the ratio of CD8 T cells to regulatory T cells in the tumor in the subject prior to the administration or a corresponding subject that did not receive the compositions disclosed herein).

[0233] In some embodiments, a designed composition disclosed herein, when administered in combination with an anti-cancer agent (e.g., immune checkpoint inhibitor, e.g., anti-PD-1 antibody or an anti-PD-L1 antibody), can enhance the ability of CD8+ T cells to kill tumor cells. In certain embodiments, the ability of CD8+ T cells to kill tumor cells is increased by at least about 10%, at least about 20%, at least about 30%, at least about 40%, at least about 50%, at least about 60%, at least about 70%, at least about 80%, at least about 90%, at least about 100%, at least about 200%, at least about 300%, at least about 400%, or at least about 500% or more, compared to a reference (e.g., the ability of CD8+ T cells to kill tumor cells in the subject prior to the administration or a corresponding subject that did not receive the compositions disclosed herein).

[0234] In some embodiments, a designed composition disclosed herein, when administered in combination with an anti-cancer agent (e.g., immune checkpoint inhibitor, e.g., anti-PD-1 antibody or an anti-PD-L1 antibody), can increase the activation and/or function of T cells (e.g., tumor-specific CD8+ or CD4+ T cells) in the subject. In certain embodiments, the activation and/or function of T cells (e.g., tumor-specific CD8+ or CD4+ T cells) is increased by at least about 10%, at least about 20%, at least about 30%, at least about 40%, at least about 50%, at least about 60%, at least about 70%, at least about 80%, at least about 90%, at least about 100%, at least about 200%, at least about 300%, at least about 400%, or at least about 500% or more, compared to a reference (e.g., the activation and/or function of the T cells in the subject prior to the administration or a corresponding subject that did not receive the compositions disclosed herein). As described herein, methods of determining the activation and/or function of T cells (e.g., tumor-specific CD8+ or CD4+ T cells) are known in the art, e.g., by measuring the expression of one or more of the following: CD45RO, CD69, IL-24, TNF-α, perforin, or IFN-γ.

[0235] In some embodiments, a designed composition disclosed herein, when administered in combination with an anti-cancer agent (e.g., immune checkpoint inhibitor, e.g., anti-PD-1 antibody or an anti-PD-L1 antibody), can reduce the expression of one or more inhibitory receptors (e.g., TIGIT, TIM-3, or LAG-3) on T cells (e.g., tumor-specific CD8+ or CD4+ T cells). In certain embodiments, the expression of one or more inhibitory receptors is decreased by at least about 10%, at least about 20%, at least about 30%, at least about 40%, at least about 50%, at least about 60%, at least about 70%, at least about 80%, or at least about 90%, compared to a reference (e.g., the expression of the corresponding inhibitory receptors on the T cells in the subject prior to the administration or a corresponding subject that did not receive the compositions disclosed herein).

[0236] Non-limiting examples of cancers that can be treated with the present disclosure include squamous cell carcinoma, small-cell lung cancer, non-small cell lung cancer, squamous non-small cell lung cancer (NSCLC), nonsquamous NSCLC, glioma, gastrointestinal cancer, renal cancer (e.g., clear cell carcinoma), ovarian cancer, liver cancer, colorectal cancer, endometrial cancer, kidney cancer (e.g., renal cell carcinoma (RCC)), prostate cancer (e.g., hormone refractory prostate adenocarcinoma), thyroid cancer, neuroblastoma, pancreatic cancer, glioblastoma (glioblastoma multiforme), cervical cancer, stomach cancer, bladder cancer, hepatoma, breast cancer, colon carcinoma, and head and neck cancer (or carcinoma), gastric cancer, germ cell tumor, pediatric sarcoma, sinonasal natural killer, melanoma (e.g., metastatic malignant melanoma, such as cutaneous or intraocular malignant melanoma), bone cancer, skin cancer, uterine cancer, cancer of the anal region, testicular cancer, carcinoma of the fallopian tubes, carcinoma of the endometrium, carcinoma of the cervix, carcinoma of the vagina, carcinoma of the vulva, cancer of the esophagus, cancer of the small intestine, cancer of the endocrine system, cancer of the parathyroid gland, cancer of the adrenal gland, sarcoma of soft tissue, cancer of the urethra, cancer of the penis, solid tumors of childhood, cancer of the ureter, carcinoma of the renal pelvis, neoplasm of the central nervous system (CNS), primary CNS lymphoma, tumor angiogenesis, spinal axis tumor, brain cancer, brain stem glioma, pituitary adenoma, Kaposi's sarcoma, epidermoid cancer, squamous cell cancer, T-cell lymphoma, environmentally-induced cancers including those induced by asbestos, virus-related cancers or cancers of viral origin (e.g., human papilloma virus (HPV-related or -originating tumors)), and hematologic malignancies derived from either of the two major blood cell lineages, i.e., the myeloid cell line (which produces granulocytes, erythrocytes, thrombocytes, macrophages and mast cells) or lymphoid cell line (which produces B, T, NK and plasma cells), such as all types of leukemias, lymphomas, and myelomas, e.g., acute, chronic, lymphocytic and/or myelogenous leukemias, such as acute leukemia (ALL), acute myelogenous leukemia (AML), chronic lymphocytic leukemia (CLL), and chronic myelogenous leukemia (CIVIL), undifferentiated AML (MO), myeloblastic leukemia (M1), myeloblastic leukemia (M2; with cell maturation), promyelocytic leukemia (M3 or M3 variant [M3V]), myelomonocytic leukemia (M4 or M4 variant with eosinophilia [M4E]), monocytic leukemia (M5), erythroleukemia (M6), megakaryoblastic leukemia (M7), isolated granulocytic sarcoma, and chloroma; lymphomas, such as Hodgkin's lymphoma (HL), non-Hodgkin's lymphoma (NEIL), B cell hematologic malignancy, e.g., B-cell lymphomas, T-cell lymphomas, lymphoplasmacytoid lymphoma, monocytoid B-cell lymphoma, mucosa-associated lymphoid tissue (MALT) lymphoma, anaplastic (e.g., Ki 1+) large-cell lymphoma, adult T-cell lymphoma/leukemia, mantle cell lymphoma, angio immunoblastic T-cell lymphoma, angiocentric lymphoma, intestinal T-cell lymphoma, primary mediastinal B-cell lymphoma, precursor T-lymphoblastic lymphoma, T-lymphoblastic; and lymphoma/leukaemia (T-Lbly/T-ALL), peripheral T-cell lymphoma, lymphoblastic lymphoma, post-transplantation lymphoproliferative disorder, true histiocytic lymphoma, primary central nervous system lymphoma, primary effusion lymphoma, B cell lymphoma, lymphoblastic lymphoma (LBL), hematopoietic tumors of lymphoid lineage, acute lymphoblastic leukemia, diffuse large B-cell lymphoma, Burkitt's lymphoma, follicular lymphoma, diffuse histiocytic lymphoma (DHL), immunoblastic large cell lymphoma, precursor B-lymphoblastic lymphoma, cutaneous T-cell lymphoma (CTLC) (also called mycosis fungoides or Sezary syndrome), and lymphoplasmacytoid lymphoma (LPL) with Waldenstrom's macroglobulinemia; myelomas, such as IgG myeloma, light chain myeloma, nonsecretory myeloma, smoldering myeloma (also called indolent myeloma), solitary plasmocytoma, and multiple myelomas, chronic lymphocytic leukemia (CLL), hairy cell lymphoma; hematopoietic tumors of myeloid lineage, tumors of mesenchymal origin, including fibrosarcoma and rhabdomyoscarcoma; seminoma, teratocarcinoma, tumors of the central and peripheral nervous, including astrocytoma, schwannomas; tumors of mesenchymal origin, including fibrosarcoma, rhabdomyoscaroma, and osteosarcoma; and other tumors, including melanoma, xeroderma pigmentosum, keratoacanthoma, seminoma, thyroid follicular cancer and teratocarcinoma, hematopoietic tumors of lymphoid lineage, for example T-cell and B-cell tumors, including but not limited to T-cell disorders such as T-prolymphocytic leukemia (T-PLL), including of the small cell and cerebriform cell type; large granular lymphocyte leukemia (LGL) of the T-cell type; a/d T-NHL hepatosplenic lymphoma; peripheral/post-thymic T cell lymphoma (pleomorphic and immunoblastic subtypes); angiocentric (nasal) T-cell lymphoma; cancer of the head or neck, renal cancer, rectal cancer, cancer of the thyroid gland; acute myeloid lymphoma, as well as any combinations of said cancers. The methods described herein can also be used for treatment of metastatic cancers, unresectable, refractory cancers (e.g., cancers refractory to previous immunotherapy, e.g., with a blocking CTLA-4 or PD-1 antibody), and/or recurrent cancers.

### Additional Information

[0237] Certain terms used in the present application are defined as follows. Additional definitions are set forth throughout the detailed description.

[0238] It is to be noted that the term “a” or “an” entity refers to one or more of that entity; for example, “a nucleotide sequence,” is understood to represent one or more nucleotide sequences. As such, the terms “a” (or “an”), “one or more,” and “at least one” can be used interchangeably herein.

[0239] Furthermore, “and/or” where used herein is to be taken as specific disclosure of each of the two specified features or components with or without the other. Thus, the term “and/or” as used in a phrase such as “A and/or B” herein is intended to include “A and B,” “A or B,” “A” (alone), and “B” (alone). Likewise, the term “and/or” as used in a phrase such as “A, B, and/or C” is intended to encompass each of the following aspects: A, B, and C; A, B, or C; A or C; A or B; B or C; A and C; A and B; B and C; A (alone); B (alone); and C (alone).

[0240] It is understood that wherever aspects are described herein with the language “comprising,” otherwise analogous aspects described in terms of “consisting of” and/or “consisting essentially of” are also provided.

[0241] Unless defined otherwise, all technical and scientific terms used herein have the same meaning as commonly understood by one of ordinary skill in the art to which this disclosure is related.

[0242] Units, prefixes, and symbols are denoted in their Système International de Unites (SI) accepted form. Numeric ranges are inclusive of the numbers defining the range. Unless otherwise indicated, nucleotide sequences are written left to right in 5′ to 3′ orientation. Amino acid sequences are written left to right in amino to carboxy orientation. The headings provided herein are not limitations of the various aspects of the disclosure, which can be had by reference to the specification as a whole. Accordingly, the terms defined immediately below are more fully defined by reference to the specification in its entirety.

[0243] As used herein, the term “approximately” or “about,” as applied to one or more values of interest, refers to a value that is similar to a stated reference value and within a range of values that fall within 25%, 20%, 19%, 18%, 17%, 16%, 15%, 14%, 13%, 12%, 11%, 10%, 9%, 8%, 7%, 6%, 5%, 4%, 3%, 2%, 1%, or less in either direction (greater than or less than) of the stated reference value unless otherwise stated or otherwise evident from the context (except where such number would exceed 100% of a possible value). When the term “approximately” or “about” is applied herein to a particular value, the value without the term “approximately” or “about” is also disclosed herein.

[0244] As described herein, any concentration range, percentage range, ratio range, or integer range is to be understood to include the value of any integer within the recited range and, when appropriate, fractions thereof (such as one tenth and one hundredth of an integer), unless otherwise indicated.

[0245] As used herein, the term “graft-versus-host-disease” (GvHD) refers to an inflammatory condition that can often occur in a subject after transplantation (e.g., HSCT), particularly where the transplanted tissue and/or cells (also referred to herein as “graft”) are from an allogenic donor. More specifically, GvHD occurs when the donor's immune cells present in the graft attack the recipient's tissues/organs, resulting in the eventual destruction of the tissues/organs if left untreated. Symptoms can vary depending on the type of GvHD. There are two main types of GvHD: (i) acute GvHD and (ii) chronic GvHD.

[0246] Acute GvHD typically develops within the first 100 days after transplantation. In contrast, chronic GvHD usually occurs more slowly (e.g., at least 100 days post-transplantation) and can last a lifetime. Acute GvHD (aGvHD) is an inflammatory process affecting different organs, clinically presenting after transplant as maculopapular rash (skin), hyperbilirubinemia and jaundice (liver), anorexia, nausea, and vomiting (upper GI), and watery or bloody diarrhea and crampy abdominal pain (lower GI) (Nassereddine 2017). The diagnosis of aGvHD is based upon clinical features and tissue biopsies, typically within the first several weeks after transplant. Acute GvHD is clinically staged and graded in severity from Grade Ito Grade IV depending on the extent of lower and upper GI, liver, and skin involvement. The International Multi-Center Consortium of Transplant Sites has developed consensus guidelines to standardize data collection around diagnosis and staging of aGvHD. These guidelines have been endorsed by the National Institutes of Health (NIH) and Center for International Blood and Marrow Transplant Research (CIBMTR) (Harris 2016a; Shoemans 2018). Chronic GvHD is characterized by progressive tissue injury leading to fibrosis and susceptibility to infection with symptoms resembling autoimmune collagen vascular diseases (Jagasia 2015). Pathogenesis may involve inflammation, cell-mediated immunity, humoral immunity, and fibrosis. It is differentiated from aGvHD by its clinical features rather than a temporal relationship to HSCT. The 2014 NIH chronic GvHD consensus criteria guidelines, endorsed by the CIBMTR, defined organ-specific scoring and severity grading. In addition, the guidelines provide the recommendation that at least one diagnostic manifestation or one distinctive manifestation plus diagnostic confirmation such as a pertinent biopsy, laboratory test or other test, medical specialist evaluation, or radiographic image in the same or other organ, be required for diagnosis (Jagasia 2015; Schoemans 2018).

[0247] In some aspects, acute GvHD can be characterized by selective damage to organs and tissues, including, but not limited to, the liver, skin, mucosa, and gastrointestinal tract. Chronic GVHD can additionally cause damage to the connective tissue, exocrine glands, and lungs. Symptoms of acute GvHD include, but are not limited to, dermatitis, mucositis, hepatitis, jaundice, enteritis, which can lead to diarrhea, nausea, vomiting, cramping, abdominal pain, blood in the stool, and combinations thereof. Non-limiting examples of symptoms associated with chronic GvHD include: dry eyes or mouth, vision changes, mouth ulcers, difficulty swallowing, gum disease and tooth decay, hair loss, nail loss and/or brittleness, sensitivity to spicy or acidic foods, mouth pain, pulmonary symptoms, such as wheezing or shortness of breath, muscle/joint pain or weakness, fatigue, skin rash that is red to purple, skin discoloration, vaginal dryness, loss of appetite, weight loss, abdominal pain, and combinations thereof. Unless indicated otherwise, the term GvHD refers to both acute and chronic GvHD.

[0248] As used herein, the term “hematopoietic stem cells” (HSCs) refers to a subset of multipotent stem cells that give rise to all the blood or immune cell types, including myeloid (e.g., monocytes and macrophages, neutrophils, basophils, eosinophils, erythrocytes, megakaryocytes/platelets, dendritic cells, mast cells), and lymphoid lineages (e.g., innate lymphoid cells, T-cells, B-cells, NKT-cells, NK-cells), and having multi-lineage hematopoietic differentiation potential and sustained self-renewal activity. The term “stem cells,” as used herein, refers to cells that retain the ability to renew themselves through mitotic cell division and can differentiate into a diverse range of specialized cell types.

[0249] As used herein, the term “hematopoietic stem cell transplantation” (HSCT) refers to the transplantation of multipotent hematopoietic stem cells from a donor to a recipient. In an “autologous” HSC transplantation, the stem cells are isolated from a subject in need of a treatment (e.g., chemotherapy or radiation therapy) and then administered back to the subject after the treatment. Therefore, in the context of autologous HSC transplantation, the terms “donor” and “recipient”/“subject” refer to the same individual. In a “syngenic” HSC transplantation, stem cells are isolated from an identical twin of the subject to be treated and then administered to the subject after treatment (e.g., chemotherapy or radiation therapy). In an “allogenic” HSC transplantation, stem cells are isolated from a healthy donor (e.g., non-identical twin or an individual related or not related to the subject to be treated) and then administered to a different recipient subject after treatment (e.g., chemotherapy or radiation therapy). In such transplantations, the terms “donor” and “subject”/“recipient” refer to different individuals. Unless specified otherwise, the term HSCT is not limited to any specific type of HSCT (e.g., encompasses autologous, syngenic, and allogenic HSCT).

[0250] The term “Glade” refers to the OTUs or members of a phylogenetic tree that are downstream of a statistically valid node in a phylogenetic tree. The Glade comprises a set of terminal leaves in the phylogenetic tree that is a distinct monophyletic evolutionary unit and that share some extent of sequence similarity.

[0251] The term “microbiota” refers to the ecological community of microorganisms that occur (sustainably or transiently) in and on an animal subject, typically a mammal such as a human, including eukaryotes, archaea, bacteria, and viruses (including bacterial viruses i.e., phage).

[0252] The term “microbiome” refers to the genetic content of the communities of microbes that live in and on the human body, both sustainably and transiently, including eukaryotes, archaea, bacteria, and viruses (including bacterial viruses (i.e., phage)), wherein “genetic content” includes genomic DNA, RNA such as ribosomal RNA, the epigenome, plasmids, and all other types of genetic information.

[0253] The term “ecological niche” or “niche” refers to the ecological space in which an organism or group of organisms occupies. Niche describes how an organism or population or organisms responds to the distribution of resources, physical parameters (e.g., host tissue space) and competitors (e.g., by growing when resources are abundant, and when predators, parasites and pathogens are scarce) and how it in turn alters those same factors (e.g., limiting access to resources by other organisms, acting as a food source for predators and a consumer of prey).

[0254] The term “dysbiosis” refers to a state of the microbiota of the GI tract or other body area in a subject, including mucosal or skin surfaces in which the normal diversity and/or function of the ecological network is disrupted. This unhealthy state can be due to a decrease in diversity, the overgrowth of one or more pathogens or pathobionts, symbiotic organisms able to cause disease only when certain genetic and/or environmental conditions are present in a subject, or the shift to an ecological microbial network that no longer provides an essential function to the host subject, and therefore no longer promotes health.

[0255] As used herein, the term “operational taxonomic units” or “OTU” (or plural, “OTUs”) refers to a terminal leaf in a phylogenetic tree and is defined by a nucleic acid sequence, e.g., the entire genome, or a specific genetic sequence, and all sequences that share sequence identity to this nucleic acid sequence at the level of species. In some embodiments the specific genetic sequence can be the 16S rDNA sequence or a portion of the 16S rDNA sequence. In other embodiments, the entire genomes of two entities are sequenced and compared. In another embodiment, select regions such as multilocus sequence tags (MLST), specific genes, or sets of genes can be genetically compared. In 16S embodiments, OTUs that share ≥97% average nucleotide identity across the entire 16S or a variable region of the 16S rDNA, e.g., a V4 region, are considered the same OTU (see, e.g., Claesson M J, Wang Q, O'Sullivan 0, Greene-Diniz R, Cole J R, Ros R P, and O'Toole P W. 2010. Comparison of two next-generation sequencing technologies for resolving highly complex microbiome composition using tandem variable 16S rRNA gene regions. Nucleic Acids Res 38: e200. Konstantinidis K T, Ramette A, and Tiedje J M. 2006. The bacterial species definition in the genomic era. Philos Trans R Soc Lond B Biol Sci 361: 1929-1940). In embodiments involving the complete genome, MLSTs, specific genes, or sets of genes OTUs that share ≥95% average nucleotide identity are considered the same OTU (see, e.g., Achtman M, and Wagner M. 2008. Microbial diversity and the genetic nature of microbial species. Nat. Rev. Microbiol. 6: 431-440. Konstantinidis K T, Ramette A, and Tiedje J M. 2006. The bacterial species definition in the genomic era. Philos Trans R Soc Lond B Biol Sci 361: 1929-1940). OTUs are frequently defined by comparing sequences between organisms. Generally, sequences with less than 95% sequence identity are not considered to form part of the same OTU. In some cases, an OTU is characterized by a combination of nucleotide markers, genes, and/or single nucleotide variants (SNVs). In some cases, the referenced genes are highly conserved genes (e.g., “house-keeping” genes). The features defining an OTU can be a combination of the foregoing. Such characterization employs, e.g., WGS data or a whole genome sequence.

[0256] As used herein, the term “phylogenetic tree” refers to a graphical representation of the evolutionary relationships of one genetic sequence to another that is generated using a defined set of phylogenetic reconstruction algorithms (e.g., parsimony, maximum likelihood, or Bayesian). Nodes in the tree represent distinct ancestral sequences and the confidence of any node is provided by a bootstrap or Bayesian posterior probability, which measures branch uncertainty.

[0257] Identification of and reference to bacterial species described herein can be found throughout the present disclosure, including the Figures/Drawings, Tables, and Sequence Listing. Where a taxonomic name is used or referenced for a specific bacterium, it is understood that the bacterium may have previously had a different taxonomic name(s) and that one of skill in the art would have resources available to identify and associate previous taxonomic names with those described herein, as used in the art, or both. Such resources include, but are not limited to, Bergey's Manual of Systematics of Archea and Bacteria (1^{st} Ed.); Bergey's Manual of Systematic Bacteriology (2^{nd} Ed.); the online version available at onlinelibrary.wiley.com/doi/book/10.1002/9781118960608; and the National Center for Biotechnology Information (NCBI) database available online at www.ncbi.nlm.nih.gov/taxonomy.

[0258] The specification is most thoroughly understood in light of the teachings of the references cited within the specification. The embodiments within the specification provide an illustration of embodiments and should not be construed to limit the scope. The skilled artisan readily recognizes that many other embodiments are encompassed. All publications and patents cited in this disclosure are incorporated by reference in their entirety. To the extent the material incorporated by reference contradicts or is inconsistent with this specification, the specification will supersede any such material. The citation of any references herein is not an admission that such references are prior art.

[0259] As used herein, the term “subject” refers to any animal subject including humans, laboratory animals (e.g., primates, rats, mice), livestock (e.g., cows, sheep, goats, pigs, turkeys, and chickens), and household pets (e.g., dogs, cats, and rodents).

[0260] The “colonization” of a host organism includes the non-transitory residence of a bacterium or other microscopic organism. In the case of treatment, the host is generally referred to herein as a “subject”, typically a human or other mammal. As used herein, “reducing colonization” of a host subject's gastrointestinal tract (or any other microbiotal niche) by a pathogenic bacterium includes a reduction in the residence time of the pathogen in the gastrointestinal tract as well as a reduction in the number (or concentration) of the pathogen in the gastrointestinal tract or adhered to the luminal surface of the gastrointestinal tract. Measuring reductions of adherent pathogens can be demonstrated, e.g., by a biopsy sample, or reductions can be measured indirectly, e.g., by measuring the pathogenic burden in the stool of a mammalian host.

[0261] A “combination” of two or more bacteria includes the physical co-existence of the two bacteria, either in the same material or product or in physically connected products, as well as the temporal co-administration or co-localization of the two bacteria.

[0262] A “cytotoxic” activity or bacterium includes the ability to kill a host cell or CD8-related toxicity. A “cytostatic” activity or bacterium includes the ability to inhibit, partially or fully, growth, metabolism, and/or proliferation of a bacterial cell, such as a pathogenic bacterial cell.

[0263] To be free of “non-comestible products” means that a bacterial composition or other material provided herein does not have a substantial amount of a non-comestible product, e.g., a product or material that is inedible, harmful or otherwise undesired in a product suitable for administration, e.g., oral administration, to a human subject. Non-comestible products are often found in preparations of bacteria from the prior art.

[0264] A “biologically pure culture” is a culture of bacteria in a medium in which only selected viable species are present and no other viable species of microorganisms are detected.

[0265] For nucleic acids, the term “substantial homology” indicates that two nucleic acids, or designated sequences thereof, when optimally aligned and compared, are identical, with appropriate nucleotide insertions or deletions, in at least about 80% of the nucleotides, at least about 90% to 95%, or at least about 98% to 99.5% of the nucleotides. Alternatively, substantial homology exists when the segments will hybridize under selective hybridization conditions, to the complement of the strand.

[0266] For polypeptides, the term “substantial homology” indicates that two polypeptides, or designated sequences thereof, when optimally aligned and compared, are identical, with appropriate amino acid insertions or deletions, in at least about 80% of the amino acids, at least about 90% to 95%, or at least about 98% to 99.5% of the amino acids.

[0267] The percent identity between two sequences is a function of the number of identical positions shared by the sequences (i.e., % homology=# of identical positions/total # of positions×100), taking into account the number of gaps, and the length of each gap, which need to be introduced for optimal alignment of the two sequences. The comparison of sequences and determination of percent identity between two sequences can be accomplished using a mathematical algorithm, as described in the non-limiting examples below.

[0268] The percent identity between two nucleotide sequences can be determined using the GAP program in the GCG software package (available at worldwideweb.gcg.com), using a NWSgapdna.CMP matrix and a gap weight of 40, 50, 60, 70, or 80 and a length weight of 1, 2, 3, 4, 5, or 6. The percent identity between two nucleotide or amino acid sequences can also be determined using the algorithm of E. Meyers and W. Miller (CABIOS, 4: 11-17 (1989)) which has been incorporated into the ALIGN program (version 2.0), using a PAM120 weight residue table, a gap length penalty of 12 and a gap penalty of 4. In addition, the percent identity between two amino acid sequences can be determined using the Needleman and Wunsch (J. Mol. Biol. (48):444-453 (1970)) algorithm which has been incorporated into the GAP program in the GCG software package (available at worldwideweb.gcg.com), using either a Blossum 62 matrix or a PAM250 matrix, and a gap weight of 16, 14, 12, 10, 8, 6, or 4 and a length weight of 1, 2, 3, 4, 5, or 6.

[0269] The nucleic acid and protein sequences described herein can further be used as a “query sequence” to perform a search against public databases to, for example, identify related sequences. Such searches can be performed using the NBLAST and)(BLAST programs (version 2.0) of Altschul, et al. (1990) J. Mol. Biol. 215:403-10. BLAST nucleotide searches can be performed with the NBLAST program, score=100, wordlength=12 to obtain nucleotide sequences homologous to the nucleic acid molecules described herein. BLAST protein searches can be performed with the) (BLAST program, score=50, wordlength=3 to obtain amino acid sequences homologous to the protein molecules described herein. To obtain gapped alignments for comparison purposes, Gapped BLAST can be utilized as described in Altschul et al., (1997) Nucleic Acids Res. 25(17):3389-3402. When utilizing BLAST and Gapped BLAST programs, the default parameters of the respective programs (e.g., XBLAST and NBLAST) can be used. See worldwideweb.ncbi.nlm.nih.gov. Other methods of determining identity that are known in the art can be used.

[0270] The term “patient” includes human and other mammalian subjects that receive either prophylactic or therapeutic treatment.

[0271] As used herein, the terms “ug” and “uM” are used interchangeably with “μg” and “μM,” respectively.

[0272] Various aspects described herein are described in further detail throughout the specification.

[0273] Unless otherwise indicated, all numbers expressing quantities of ingredients, reaction conditions, and so forth used in the specification, including claims, are to be understood as being modified in all instances by the term “about.” Accordingly, unless otherwise indicated to the contrary, the numerical parameters are approximations and can vary depending upon the desired properties sought to be obtained. At the very least, and not as an attempt to limit the application of the doctrine of equivalents to the scope of the claims, each numerical parameter should be construed in light of the number of significant digits and ordinary rounding approaches.

[0274] Table A shows “STR” designations for strains described herein, SEQ ID NOs of 16S rDNA sequences encoding the 16S rRNA of each STR, and a reference to the species or strain name sharing high sequence identity with the 16S rDNA sequence for each SEQ ID NO.

TABLE A
SEQ ID NO, STR Designation, and Associated Species

| SEQ ID NO | STR | Species |
|---|---|---|
| SEQ ID NO: 1 | STR00005.1 | Collinsella_aerofaciens_strain_JCM_10188_16S_ribosomal_RNA |
| SEQ ID NO: 2 | STR00003.1 | Bacteroides_uniformis_strain_JCM_5828_16S_ribosomal_RNA |
| SEQ ID NO: 3 | STR00044.1 | Ruminococcus_lactaris_ATCC_29176_16S_ribosomal_RNA |
| SEQ ID NO: 4 | STR00043.1 | Blautia_wexlerae_DSM_19850_16S_ribosomal_RNA |
| SEQ ID NO: 5 | STR00053 | Bifidobacterium_longum_strain_KCTC_3128_16S_ribosomal_RNA |
| SEQ ID NO: 6 | STR00059.1 | Butyricimonas_faecihominis_strain_180-3_16S_ribosomal_RNA |
| SEQ ID NO: 7 | STR00060.1 | [Clostridium]_spiroforme_strain_JCM_1432_16S_ribosomal_RNA |
| SEQ ID NO: 8 | STR00061.1 | Bacteroides_caccae_strain_JCM_9498_16S_ribosomal_RNA |
| SEQ ID NO: 9 | STR00062.1 | Alistipes_finegoldii_strain_AHN_2437_16S_ribosomal_RNA |
| SEQ ID NO: 10 | STR00066.1 | Lactonifactor_longoviformis_strain_ED-Mt61/PYG-s6_16S_ribosomal_RNA |
| SEQ ID NO: 11 | STR00067.1 | Intestinimonas_butyriciproducens_strain_SRB-521-5-I_16S_ribosomal_RNA |
| SEQ ID NO: 12 | STR00065 | Drancourtella_massiliensis_strain_GD1_16S_ribosomal_RNA |
| SEQ ID NO: 13 | STR00069 | Faecalicatena_orotica_strain_JCM_1429_16S_ribosomal_RNA |
| SEQ ID NO: 14 | STR00068.1 | Parabacteroides_distasonis_strain_JCM_5825_16S_ribosomal_RNA |
| SEQ ID NO: 15 | STR00070.1 | Oscillibacter_ruminantium_GH1_16S_ribosomal_RNA |
| SEQ ID NO: 16 | STR00071.1 | Akkermansia_muciniphila_strain_ATCC_BAA-835_16S_ribosomal_RNA |
| SEQ ID NO: 17 | STR00007.1 | Bacteroides_koreensis_strain_YS-aM39_16S_ribosomal_RNA |
| SEQ ID NO: 18 | STR00072 | Clostridium_disporicum_strain_DS1_16S_ribosomal_RNA |
| SEQ ID NO: 19 | STR00075.3 | Flavonifractor_plautii_strain_265_16S_ribosomal_RNA |
| SEQ ID NO: 20 | STR00077.1 | Terrisporobacter_mayombei_strain_SFC-5_16S_ribosomal_RNA |
| SEQ ID NO: 21 | STR00076.5 | Blautia_hominis_strain_KB1_16S_ribosomal_RNA |
| SEQ ID NO: 22 | STR00078.1 | Roseburia_intestinalis_L1-82_16S_ribosomal_RNA |
| SEQ ID NO: 23 | STR00079.1 | Lachnospira_pectinoschiza_strain_150-1_16S_ribosomal_RNA |
| SEQ ID NO: 24 | STR00080.1 | [Eubacterium]_rectale_ATCC_33656_16S_ribosomal_RNA |
| SEQ ID NO: 25 | STR00082.1 | Roseburia_intestinalis_L1-82_16S_ribosomal_RNA |
| SEQ ID NO: 26 | STR00085.1 | Lactonifactor_longoviformis_strain_ED-Mt61/PYG-s6_16S_ribosomal_RNA |
| SEQ ID NO: 27 | STR00086 | Turicibacter_sanguinis_strain_MOL361_16S_ribosomal_RNA |
| SEQ ID NO: 28 | STR00089.1 | Terrisporobacter_petrolearius_strain_LAM0A37_16S_ribosomal_RNA |
| SEQ ID NO: 29 | STR00090 | Cellulosilyticum_lentocellum_DSM_5427_16S_ribosomal_RNA |
| SEQ ID NO: 30 | STR00091.1 | Blautia_hominis_strain_KB1_16S_ribosomal_RNA |
| SEQ ID NO: 31 | STR00092.6 | Erysipelatoclostridium_ramosum_strain_JCM_1298_16S_ribosomal_RNA |
| SEQ ID NO: 32 | STR00094.1 | Romboutsia_timonensis_strain_DR1_16S_ribosomal_RNA |
| SEQ ID NO: 33 | STR00098.1 | Robinsoniella_peoriensis_strain_PPC31_16S_ribosomal_RNA |
| SEQ ID NO: 34 | STR00093.1 | Anaeromassilibacillus_senegalensis_strain_mt9_16S_ribosomal_RNA |
| SEQ ID NO: 35 | STR00096.5 | Faecalicatena_orotica_strain_DSM_1287_16S_ribosomal_RNA |
| SEQ ID NO: 36 | STR00097.3 | Emergencia_timonensis_strain_SN18_16S_ribosomal_RNA |
| SEQ ID NO: 37 | STR00100.1 | Bacteroides_vulgatus_ATCC_8482_16S_ribosomal_RNA |
| SEQ ID NO: 38 | STR00099.1 | Clostridium_subterminale_strain_JCM_1417_16S_ribosomal_RNA |
| SEQ ID NO: 39 | STR00101.1 | Blautia_coccoides_strain_JCM_1395_16S_ribosomal_RNA |
| SEQ ID NO: 40 | STR00108.1 | [Clostridium]_symbiosum_strain_ATCC_14940_16S_ribosomal_RNA |
| SEQ ID NO: 41 | STR00106.1 | [Clostridium]_scindens_strain_ATCC_35704_16S_ribosomal_RNA |
| SEQ ID NO: 42 | STR00105.7 | Dorea_longicatena_strain_111-35_16S_ribosomal_RNA |
| SEQ ID NO: 43 | STR00104.1 | Eisenbergiella_tayi_strain_B086562_16S_ribosomal_RNA |
| SEQ ID NO: 44 | STR00107.5 | [Clostridium]_aldenense_strain_RMA_9741_16S_ribosomal_RNA |
| SEQ ID NO: 45 | STR00109.1 | Intestinimonas_butyriciproducens_strain_SRB-521-5-I_16S_ribosomal_RNA |
| SEQ ID NO: 46 | STR00111.1 | [Clostridium]_lavalense_strain_CCRI-9842_16S_ribosomal_RNA |
| SEQ ID NO: 47 | STR00112.1 | Turicibacter_sanguinis_strain_MOL361_16S_ribosomal_RNA |
| SEQ ID NO: 48 | STR00116.1 | [Ruminococcus]_gnavus_ATCC_29149_16S_ribosomal_RNA |
| SEQ ID NO: 49 | STR00115.1 | Blautia_producta_ATCC_27340_=_DSM_2950_strain_JCM_1471_16S_ribosomal_RNA |
| SEQ ID NO: 50 | STR00113.1 | Barnesiella_intestinihominis_YIT_11860_16S_ribosomal_RNA |
| SEQ ID NO: 51 | STR00114.1 | Bacteroides_salyersiae_strain_JCM_12988_16S_ribosomal_RNA |
| SEQ ID NO: 52 | STR00118.1 | Eubacterium_callanderi_strain_DSM_3662_16S_ribosomal_RNA |
| SEQ ID NO: 53 | STR00121.1 | Anaerostipes_caccae_strain_L1-92_16S_ribosomal_RNA |
| SEQ ID NO: 54 | STR00120.1 | Bifidobacterium_longum_subsp._suillum_strain_Su_851_16S_ribosomal_RNA |
| SEQ ID NO: 55 | STR00125 | Bacteroides_kribbi_strain_R2F3-3-3_16S_ribosomal_RNA |
| SEQ ID NO: 56 | STR00124.1 | Bacteroides_uniformis_strain_JCM_5828_16S_ribosomal_RNA |
| SEQ ID NO: 57 | STR00126.1 | Bacteroides_vulgatus_ATCC_8482_16S_ribosomal_RNA |
| SEQ ID NO: 58 | STR00123.1 | Lactobacillus_fermentum_strain_CIP_102980_16S_ribosomal_RNA |
| SEQ ID NO: 59 | STR00117.1 | Blautia_hominis_strain_KB1_16S_ribosomal_RNA |
| SEQ ID NO: 60 | STR00129.1 | Coprococcus_eutactus_strain_ATCC_27759_16S_ribosomal_RNA |
| SEQ ID NO: 61 | STR00127.1 | [Ruminococcus]_torques_strain_VPI_B2-51_16S_ribosomal_RNA |
| SEQ ID NO: 62 | STR00128.1 | [Ruminococcus]_gnavus_ATCC_29149_16S_ribosomal_RNA |
| SEQ ID NO: 63 | STR00131.1 | Eubacterium_callanderi_strain_DSM_3662_16S_ribosomal_RNA |
| SEQ ID NO: 64 | STR00041.1 | Tyzzerella_nexilis_DSM_1787_16S_ribosomal_RNA |
| SEQ ID NO: 65 | STR00030.1 | Blautia_hominis_strain_KB1_16S_ribosomal_RNA |
| SEQ ID NO: 66 | STR00037.1 | Paraclostridium_bifermentans_strain_JCM_1386_16S_ribosomal_RNA |
| SEQ ID NO: 67 | STR00018.1 | Bacteroides_uniformis_strain_JCM_5828_16S_ribosomal_RNA |
| SEQ ID NO: 68 | STR00017 | Bifidobacterium_stercoris_JCM_15918_strain_Eg1_16S_ribosomal_RNA |
| SEQ ID NO: 69 | STR00039.1 | [Ruminococcus]_gnavus_ATCC_29149_16S_ribosomal_RNA |
| SEQ ID NO: 70 | STR00021.1 | Emergencia_timonensis_strain_SN18_16S_ribosomal_RNA |
| SEQ ID NO: 71 | STR00035.1 | Bacteroides_xylanisolvens_XB1A_16S_ribosomal_RNA |
| SEQ ID NO: 72 | STR00023 | [Clostridium]_symbiosum_strain_ATCC_14940_16S_ribosomal_RNA |
| SEQ ID NO: 73 | STR00020.1 | Erysipelatoclostridium_ramosum_strain_JCM_1298_16S_ribosomal_RNA |
| SEQ ID NO: 74 | STR00031.1 | Bacteroides_intestinalis_strain_341_16S_ribosomal_RNA |
| SEQ ID NO: 75 | STR00042 | Absiella_dolichum_strain_JCM_10413_16S_ribosomal_RNA |
| SEQ ID NO: 76 | STR00038.1 | Bacteroides_eggerthii_strain_JCM_12986_16S_ribosomal_RNA |
| SEQ ID NO: 77 | STR00024.1 | Flavonifractor_plautii_strain_265_16S_ribosomal_RNA |
| SEQ ID NO: 78 | STR00033.1 | Holdemania_filiformis_strain_J1-31B-1_16S_ribosomal_RNA |
| SEQ ID NO: 79 | STR00013.1 | [Clostridium]_innocuum_strain_B-3_16S_ribosomal_RNA |
| SEQ ID NO: 80 | STR00022.5 | [Clostridium]_bolteae_strain_JCM_12243_16S_ribosomal_RNA |
| SEQ ID NO: 81 | STR00027 | [Clostridium]_scindens_strain_ATCC_35704_16S_ribosomal_RNA |
| SEQ ID NO: 82 | STR00036.1 | Bacteroides_faecis_MAJ27_16S_ribosomal_RNA |
| SEQ ID NO: 83 | STR00019 | [Clostridium]_hylemonae_strain_TN-272_16S_ribosomal_RNA |
| SEQ ID NO: 84 | STR00034.1 | [Clostridium]_bolteae_strain_16351_16S_ribosomal_RNA |
| SEQ ID NO: 85 | STR00012.5 | [Clostridium]_innocuum_strain_B-3_16S_ribosomal_RNA |
| SEQ ID NO: 86 | STR00045.1 | Intestinimonas_butyriciproducens_strain_SRB-521-5-I_16S_ribosomal_RNA |
| SEQ ID NO: 87 | STR00047.1 | Cellulosilyticum_lentocellum_DSM_5427_16S_ribosomal_RNA |
| SEQ ID NO: 88 | STR00002.1 | Coprococcus_comes_ATCC_27758_16S_ribosomal_RNA |
| SEQ ID NO: 89 | STR00052.1 | Cellulosilyticum_lentocellum_DSM_5427_16S_ribosomal_RNA |
| SEQ ID NO: 90 | STR00056.1 | Cellulosilyticum_lentocellum_DSM_5427_16S_ribosomal_RNA |
| SEQ ID NO: 91 | STR00048.1 | [Clostridium]_glycyrrhizinilyticum_strain_ZM35_16S_ribosomal_RNA |
| SEQ ID NO: 92 | STR00046.1 | Longicatena_caecimuris_strain_PG-426-CC-2_16S_ribosomal_RNA |
| SEQ ID NO: 93 | STR00049 | Eggerthella_lenta_strain_DSM_2243_16S_ribosomal_RNA |
| SEQ ID NO: 94 | STR00051.1 | [Clostridium]_spiroforme_strain_JCM_1432_16S_ribosomal_RNA |
| SEQ ID NO: 95 | STR00001.1 | [Clostridium]_innocuum_strain_B-3_16S_ribosomal_RNA |
| SEQ ID NO: 96 | STR00054.1 | Clostridium_tertium_strain_795_16S_ribosomal_RNA |
| SEQ ID NO: 97 | STR00134.1 | Blautia_hydrogenotrophica_strain_S5a36_16S_ribosomal_RNA |
| SEQ ID NO: 98 | STR00133 | [Clostridium]_scindens_strain_ATCC_35704_16S_ribosomal_RNA |
| SEQ ID NO: 99 | STR00132.5 | Eisenbergiella_tayi_strain_B086562_16S_ribosomal_RNA |
| SEQ ID NO: 100 | STR00135.1 | Holdemania_massiliensis_AP2_16S_ribosomal_RNA |
| SEQ ID NO: 101 | STR00136.1 | Bacteroides_eggerthii_strain_JCM_12986_16S_ribosomal_RNA |
| SEQ ID NO: 102 | STR00032.1 | Gemmiger_formicilis_strain_X2-56_16S_ribosomal_RNA |
| SEQ ID NO: 103 | STR00137 | Bifidobacterium_dentium_strain_B764_16S_ribosomal_RNA |
| SEQ ID NO: 104 | STR00143.6 | Blautia_obeum_ATCC_29174_16S_ribosomal_RNA |
| SEQ ID NO: 105 | STR00139.4 | [Clostridium]_scindens_strain_ATCC_35704_16S_ribosomal_RNA |
| SEQ ID NO: 106 | STR00016 | Clostridium_butyricum_strain_JCM_1391_16S_ribosomal_RNA |
| SEQ ID NO: 107 | STR00014 | Ruminococcus_faecis_JCM_15917_strain_Eg2_16S_ribosomal_RNA |
| SEQ ID NO: 108 | STR00059 | Butyricimonas_faecihominis_strain_180-3_16S_ribosomal_RNA |
| SEQ ID NO: 109 | STR00085 | Lactonifactor_longoviformis_strain_ED-Mt61/PYG-s6_16S_ribosomal_RNA |
| SEQ ID NO: 110 | STR00005 | Collinsella_aerofaciens_strain_JCM_10188_16S_ribosomal_RNA |
| SEQ ID NO: 111 | STR00101 | Blautia_coccoides_strain_JCM_1395_16S_ribosomal_RNA |
| SEQ ID NO: 112 | STR00006 | Shigella_flexneri_strain_ATCC_29903_16S_ribosomal_RNA |
| SEQ ID NO: 113 | STR00011 | Blautia_obeum_ATCC_29174_16S_ribosomal_RNA |
| SEQ ID NO: 114 | STR00077 | Terrisporobacter_mayombei_strain_SFC-5_16S_ribosomal_RNA |
| SEQ ID NO: 115 | STR00091 | Blautia_hominis_strain_KB1_16S_ribosomal_RNA |
| SEQ ID NO: 116 | STR00067 | Intestinimonas_butyriciproducens_strain_SRB-521-5-I_16S_ribosomal_RNA |
| SEQ ID NO: 117 | STR00079 | Lachnospira_pectinoschiza_strain_150-1_16S_ribosomal_RNA |
| SEQ ID NO: 118 | STR00089 | Terrisporobacter_petrolearius_strain_LAM0A37_16S_ribosomal_RNA |
| SEQ ID NO: 119 | STR00068 | Parabacteroides_distasonis_strain_JCM_5825_16S_ribosomal_RNA |
| SEQ ID NO: 120 | STR00043 | Blautia_wexlerae_DSM_19850_16S_ribosomal_RNA |
| SEQ ID NO: 121 | STR00070 | Oscillibacter_ruminantium_GH1_16S_ribosomal_RNA |
| SEQ ID NO: 122 | STR00044 | Ruminococcus_lactaris_ATCC_29176_16S_ribosomal_RNA |
| SEQ ID NO: 123 | STR00080 | [Eubacterium]_rectale_ATCC_33656_16S_ribosomal_RNA |
| SEQ ID NO: 124 | STR00099 | Clostridium_subterminale_strain_JCM_1417_16S_ribosomal_RNA |
| SEQ ID NO: 125 | STR00063 | Ruthenibacterium_lactatiformans_strain_585-1_16S_ribosomal_RNA |
| SEQ ID NO: 126 | STR00066 | Lactonifactor_longoviformis_strain_ED-Mt61/PYG-s6_16S_ribosomal_RNA |
| SEQ ID NO: 127 | STR00102 | [Clostridium]_bolteae_strain_JCM_12243_16S_ribosomal_RNA |
| SEQ ID NO: 128 | STR00060 | [Clostridium]_spiroforme_strain_JCM_1432_16S_ribosomal_RNA |
| SEQ ID NO: 129 | STR00062 | Alistipes_finegoldii_strain_AHN_2437_16S_ribosomal_RNA |
| SEQ ID NO: 130 | STR00003 | Bacteroides_uniformis_strain_JCM_5828_16S_ribosomal_RNA |
| SEQ ID NO: 131 | STR00061 | Bacteroides_caccae_strain_JCM_9498_16S_ribosomal_RNA |
| SEQ ID NO: 132 | STR00071 | Akkermansia_muciniphila_strain_ATCC_BAA-835_16S_ribosomal_RNA |
| SEQ ID NO: 133 | STR00007 | Bacteroides_koreensis_strain_YS-aM39_16S_ribosomal_RNA |
| SEQ ID NO: 134 | STR00073 | Ruminococcus_albus_strain_JCM_14654_16S_ribosomal_RNA |
| SEQ ID NO: 135 | STR00078 | Roseburia_intestinalis_L1-82_16S_ribosomal_RNA |
| SEQ ID NO: 136 | STR00126 | Bacteroides_vulgatus_ATCC_8482_16S_ribosomal_RNA |
| SEQ ID NO: 137 | STR00018 | Bacteroides_uniformis_strain_JCM_5828_16S_ribosomal_RNA |
| SEQ ID NO: 138 | STR00054 | Clostridium_tertium_strain_795_16S_ribosomal_RNA |
| SEQ ID NO: 139 | STR00038 | Bacteroides_eggerthii_strain_JCM_12986_16S_ribosomal_RNA |
| SEQ ID NO: 140 | STR00030 | Blautia_hominis_strain_KB1_16S_ribosomal_RNA |
| SEQ ID NO: 141 | STR00055 | [Clostridium]_bolteae_strain_JCM_12243_16S_ribosomal_RNA |
| SEQ ID NO: 142 | STR00039 | [Ruminococcus]_gnavus_ATCC_29149_16S_ribosomal_RNA |
| SEQ ID NO: 143 | STR00047 | Cellulosilyticum_lentocellum_DSM_5427_16S_ribosomal_RNA |
| SEQ ID NO: 144 | STR00026 | Faecalibacterium_prausnitzii_strain_ATCC_27768_16S_ribosomal_RNA |
| SEQ ID NO: 145 | STR00136 | Bacteroides_eggerthii_strain_JCM_12986_16S_ribosomal_RNA |
| SEQ ID NO: 146 | STR00020 | Erysipelatoclostridium_ramosum_strain_JCM_1298_16S_ribosomal_RNA |
| SEQ ID NO: 147 | STR00002 | Coprococcus_comes_ATCC_27758_16S_ribosomal_RNA |
| SEQ ID NO: 148 | STR00013 | [Clostridium]_innocuum_strain_B-3_16S_ribosomal_RNA |
| SEQ ID NO: 149 | STR00021 | Emergencia_timonensis_strain_SN18_16S_ribosomal_RNA |
| SEQ ID NO: 150 | STR00034 | [Clostridium]_bolteae_strain_16351_16S_ribosomal_RNA |
| SEQ ID NO: 151 | STR00134 | Blautia_hydrogenotrophica_strain_S5a36_16S_ribosomal_RNA |
| SEQ ID NO: 152 | STR00040 | Ruminococcus_bromii_strain_ATCC_27255_16S_ribosomal_RNA |
| SEQ ID NO: 153 | STR00057 | Longibaculum_muris_strain_MT10-315-CC-1.2-2_16S_ribosomal_RNA |
| SEQ ID NO: 154 | STR00024 | Flavonifractor_plautii_strain_265_16S_ribosomal_RNA |
| SEQ ID NO: 155 | STR00031 | Bacteroides_intestinalis_strain_341_16S_ribosomal_RNA |
| SEQ ID NO: 156 | STR00050 | [Eubacterium]_rectale_ATCC_33656_16S_ribosomal_RNA |
| SEQ ID NO: 157 | STR00001 | [Clostridium]_innocuum_strain_B-3_16S_ribosomal_RNA |
| SEQ ID NO: 158 | STR00048 | [Clostridium]_glycyrrhizinilyticum_strain_ZM35_16S_ribosomal_RNA |
| SEQ ID NO: 159 | STR00035 | Bacteroides_xylanisolvens_XB1A_16S_ribosomal_RNA |
| SEQ ID NO: 160 | STR00052 | Cellulosilyticum_lentocellum_DSM_5427_16S_ribosomal_RNA |
| SEQ ID NO: 161 | STR00046 | Longicatena_caecimuris_strain_PG-426-CC-2_16S_ribosomal_RNA |
| SEQ ID NO: 162 | STR00132.4 | Eisenbergiella_tayi_strain_B086562_16S_ribosomal_RNA |
| SEQ ID NO: 163 | STR00058 | Agathobaculum_desmolans_strain_ATCC_43058_16S_ribosomal_RNA |
| SEQ ID NO: 164 | STR00120 | Bifidobacterium_longum_subsp._suillum_strain_Su_851_16S_ribosomal_RNA |
| SEQ ID NO: 165 | STR00045 | Intestinimonas_butyriciproducens_strain_SRB-521-5-I_16S_ribosomal_RNA |
| SEQ ID NO: 166 | STR00025.5 | Eubacterium_callanderi_strain_DSM_3662_16S_ribosomal_RNA |
| SEQ ID NO: 167 | STR00116 | [Ruminococcus]_gnavus_ATCC_29149_16S_ribosomal_RNA |
| SEQ ID NO: 168 | STR00128 | [Ruminococcus]_gnavus_ATCC_29149_16S_ribosomal_RNA |
| SEQ ID NO: 169 | STR00051 | [Clostridium]_spiroforme_strain_JCM_1432_16S_ribosomal_RNA |
| SEQ ID NO: 170 | STR00037 | Paraclostridium_bifermentans_strain_JCM_1386_16S_ribosomal_RNA |
| SEQ ID NO: 171 | STR00056 | Cellulosilyticum_lentocellum_DSM_5427_16S_ribosomal_RNA |
| SEQ ID NO: 172 | STR00036 | Bacteroides_faecis_MAJ27_16S_ribosomal_RNA |
| SEQ ID NO: 173 | STR00135 | Holdemania_massiliensis_AP2_16S_ribosomal_RNA |
| SEQ ID NO: 174 | STR00124 | Bacteroides_uniformis_strain_JCM_5828_16S_ribosomal_RNA |
| SEQ ID NO: 175 | STR00041 | Tyzzerella_nexilis_DSM_1787_16S_ribosomal_RNA |
| SEQ ID NO: 176 | STR00121 | Anaerostipes_caccae_strain_L1-92_16S_ribosomal_RNA |
| SEQ ID NO: 177 | STR00131 | Eubacterium_callanderi_strain_DSM_3662_16S_ribosomal_RNA |
| SEQ ID NO: 178 | STR00093 | Anaeromassilibacillus_senegalensis_strain_mt9_16S_ribosomal_RNA |
| SEQ ID NO: 179 | STR00100 | Bacteroides_vulgatus_ATCC_8482_16S_ribosomal_RNA |
| SEQ ID NO: 180 | STR00127 | [Ruminococcus]_torques_strain_VPI_B2-51_16S_ribosomal_RNA |
| SEQ ID NO: 181 | STR00082 | Roseburia_intestinalis_L1-82_16S_ribosomal_RNA |
| SEQ ID NO: 182 | STR00123 | Lactobacillus_fermentum_strain_CIP_102980_16S_ribosomal_RNA |
| SEQ ID NO: 183 | STR00092.5 | Erysipelatoclostridium_ramosum_strain_JCM_1298_16S_ribosomal_RNA |
| SEQ ID NO: 184 | STR00098 | Robinsoniella_peoriensis_strain_PPC31_16S_ribosomal_RNA |
| SEQ ID NO: 185 | STR00104 | Eisenbergiella_tayi_strain_B086562_16S_ribosomal_RNA |
| SEQ ID NO: 186 | STR00114 | Bacteroides_salyersiae_strain_JCM_12988_16S_ribosomal_RNA |
| SEQ ID NO: 187 | STR00109 | Intestinimonas_butyriciproducens_strain_SRB-521-5-I_16S_ribosomal_RNA |
| SEQ ID NO: 188 | STR00129 | Coprococcus_eutactus_strain_ATCC_27759_16S_ribosomal_RNA |
| SEQ ID NO: 189 | STR00111 | [Clostridium]_lavalense_strain_CCRI-9842_16S_ribosomal_RNA |
| SEQ ID NO: 190 | STR00108 | [Clostridium]_symbiosum_strain_ATCC_14940_16S_ribosomal_RNA |
| SEQ ID NO: 191 | STR00119 | Turicibacter_sanguinis_strain_MOL361_16S_ribosomal_RNA |
| SEQ ID NO: 192 | STR00113 | Barnesiella_intestinihominis_YIT_11860_16S_ribosomal_RNA |
| SEQ ID NO: 193 | STR00097.4 | Emergencia_timonensis_strain_SN18_16S_ribosomal_RNA |
| SEQ ID NO: 194 | STR00112 | Turicibacter_sanguinis_strain_MOL361_16S_ribosomal_RNA |
| SEQ ID NO: 195 | STR00118 | Eubacterium_callanderi_strain_DSM_3662_16S_ribosomal_RNA |
| SEQ ID NO: 196 | STR00122 | Bacteroides_intestinalis_strain_341_16S_ribosomal_RNA |
| SEQ ID NO: 197 | STR00105.6 | Dorea_longicatena_strain_111-35_16S_ribosomal_RNA |
| SEQ ID NO: 198 | STR00094 | Romboutsia_timonensis_strain_DR1_16S_ribosomal_RNA |
| SEQ ID NO: 199 | STR00106 | [Clostridium]_scindens_strain_ATCC_35704_16S_ribosomal_RNA |
| SEQ ID NO: 200 | STR00084 | Murimonas_intestini_strain_SRB-530-5-H_16S_ribosomal_RNA |
| SEQ ID NO: 201 | STR00115 | Blautia_producta_ATCC_27340_=_DSM_2950_strain_JCM_1471_16S_ribosomal_RNA |
| SEQ ID NO: 202 | STR00117 | Blautia_hominis_strain_KB1_16S_ribosomal_RNA |
| SEQ ID NO: 203 | STR00138 | Peptostreptococcus_stomatis_strain_W2278_16S_ribosomal_RNA |
| SEQ ID NO: 204 | STR00032 | Gemmiger_formicilis_strain_X2-56_16S_ribosomal_RNA |
| SEQ ID NO: 205 | STR00081.3 | Anaerotruncus_colihominis_strain_WAL_14565_16S_ribosomal_RNA |
| SEQ ID NO: 206 | STR00033 | Holdemania_filiformis_strain_J1-31B-1_16S_ribosomal_RNA |
| SEQ ID NO: 207 | STR00142 | Anaerofustis_stercorihominis_strain_WAL_14563_16S_ribosomal_RNA |
| SEQ ID NO: 208 | STR00140 | Blautia_luti_DSM_14534_16S_ribosomal_RNA |
| SEQ ID NO: 209 | STR00004 | Parabacteroides_merdae_strain_JCM_9497_16S_ribosomal_RNA |
| SEQ ID NO: 210 | STR00141 | [Clostridium]_lavalense_strain_CCRI-9842_16S_ribosomal_RNA |
| SEQ ID NO: 211 | STR00008 | Clostridium_tertium_strain_795_16S_ribosomal_RNA |
| SEQ ID NO: 212 | STR00009 | Clostridium_disporicum_strain_DS1_16S_ribosomal_RNA |
| SEQ ID NO: 213 | STR00064 | Harryflintia_acetispora_strain_V20-281a_16S_ribosomal_RNA |
| SEQ ID NO: 214 | STR00028 | Paraclostridium_bifermentans_strain_JCM_1386_16S_ribosomal_RNA |
| SEQ ID NO: 215 | STR00083.5 | Murimonas_intestini_strain_SRB-530-5-H_16S_ribosomal_RNA |
| SEQ ID NO: 216 | STR00130 | [Clostridium]_scindens_strain_ATCC_35704_16S_ribosomal_RNA |
| SEQ ID NO: 217 | STR00090.1 | Cellulosilyticum_lentocellum_DSM_5427_16S_ribosomal_RNA |
| SEQ ID NO: 218 | STR00065.1 | Drancourtella_massiliensis_strain_GD1_16S_ribosomal_RNA |
| SEQ ID NO: 219 | STR00072.1 | Clostridium_disporicum_strain_DS1_16S_ribosomal_RNA |
| SEQ ID NO: 220 | STR00110 | Paeniclostridium_sordellii_strain_JCM_3814_16S_ribosomal_RNA |
| SEQ ID NO: 221 | STR00019.1 | [Clostridium]_hylemonae_strain_TN-272_16S_ribosomal_RNA |
| SEQ ID NO: 222 | STR00010.7 | Blautia_wexlerae_DSM_19850_16S_ribosomal_RNA |
| SEQ ID NO: 223 | STR00053.1 | Bifidobacterium_longum_strain_KCTC_3128_16S_ribosomal_RNA |
| SEQ ID NO: 224 | STR00029 | Alistipes_shahii_WAL_8301_16S_ribosomal_RNA |
| SEQ ID NO: 225 | STR00023.1 | [Clostridium]_symbiosum_strain_ATCC_14940_16S_ribosomal_RNA |
| SEQ ID NO: 226 | STR00075.4 | Flavonifractor_plautii_strain_265_16S_ribosomal_RNA |
| SEQ ID NO: 227 | STR00074 | Roseburia_inulinivorans_DSM_16841_strain_A2-194_16S_ribosomal_RNA |
| SEQ ID NO: 228 | STR00103 | Flavonifractor_plautii_strain_265_16S_ribosomal_RNA |
| SEQ ID NO: 229 | STR00086.1 | Turicibacter_sanguinis_strain_MOL361_16S_ribosomal_RNA |
| SEQ ID NO: 230 | STR00049.1 | Eggerthella_lenta_strain_DSM_2243_16S_ribosomal_RNA |
| SEQ ID NO: 231 | STR00012.6 | [Clostridium]_innocuum_strain_B-3_16S_ribosomal_RNA |
| SEQ ID NO: 232 | STR00015 | Terrisporobacter_petrolearius_strain_LAM0A37_16S_ribosomal_RNA |
| SEQ ID NO: 233 | STR00076.6 | Blautia_hominis_strain_KB1_16S_ribosomal_RNA |
| SEQ ID NO: 234 | STR00087 | Faecalicatena_contorta_strain_DSM_3982_16S_ribosomal_RNA |
| SEQ ID NO: 235 | STR00096.6 | Faecalicatena_orotica_strain_DSM_1287_16S_ribosomal_RNA |
| SEQ ID NO: 236 | STR00095 | Intestinimonas_butyriciproducens_strain_SRB-521-5-I_16S_ribosomal_RNA |
| SEQ ID NO: 237 | STR00088.1 | Turicibacter_sanguinis_strain_MOL361_16S_ribosomal_RNA |
| SEQ ID NO: 238 | STR00088 | Turicibacter_sanguinis_strain_MOL361_16S_ribosomal_RNA |
| SEQ ID NO: 239 | STR00088.2 | Turicibacter_sanguinis_strain_MOL361_16S_ribosomal_RNA |
| SEQ ID NO: 240 | STR00088.3 | Turicibacter_sanguinis_strain_MOL361_16S_ribosomal_RNA |
| SEQ ID NO: 241 | STR00010 | Blautia_wexlerae_DSM_19850_16S_ribosomal_RNA |
| SEQ ID NO: 242 | STR00010.1 | Blautia_wexlerae_DSM_19850_16S_ribosomal_RNA |
| SEQ ID NO: 243 | STR00010.2 | Blautia_wexlerae_DSM_19850_16S_ribosomal_RNA |
| SEQ ID NO: 244 | STR00010.3 | Blautia_wexlerae_DSM_19850_16S_ribosomal_RNA |
| SEQ ID NO: 245 | STR00010.4 | Blautia_wexlerae_DSM_19850_16S_ribosomal_RNA |
| SEQ ID NO: 246 | STR00010.5 | Blautia_wexlerae_DSM_19850_16S_ribosomal_RNA |
| SEQ ID NO: 247 | STR00010.8 | Blautia_wexlerae_DSM_19850_16S_ribosomal_RNA |
| SEQ ID NO: 248 | STR00012 | [Clostridium]_innocuum_strain_B-3_16S_ribosomal_RNA |
| SEQ ID NO: 249 | STR00012.1 | [Clostridium]_innocuum_strain_B-3_16S_ribosomal_RNA |
| SEQ ID NO: 250 | STR00012.2 | [Clostridium]_innocuum_strain_B-3_16S_ribosomal_RNA |
| SEQ ID NO: 251 | STR00012.3 | [Clostridium]_innocuum_strain_B-3_16S_ribosomal_RNA |
| SEQ ID NO: 252 | STR00012.4 | [Clostridium]_innocuum_strain_B-3_16S_ribosomal_RNA |
| SEQ ID NO: 253 | STR00022 | [Clostridium]_bolteae_strain_JCM_12243_16S_ribosomal_RNA |
| SEQ ID NO: 254 | STR00022.1 | [Clostridium]_bolteae_strain_JCM_12243_16S_ribosomal_RNA |
| SEQ ID NO: 255 | STR00022.2 | [Clostridium]_bolteae_strain_JCM_12243_16S_ribosomal_RNA |
| SEQ ID NO: 256 | STR00022.3 | [Clostridium]_bolteae_strain_JCM_12243_16S_ribosomal_RNA |
| SEQ ID NO: 257 | STR00022.4 | [Clostridium]_bolteae_strain_JCM_12243_16S_ribosomal_RNA |
| SEQ ID NO: 258 | STR00025 | Eubacterium_callanderi_strain_DSM_3662_16S_ribosomal_RNA |
| SEQ ID NO: 259 | STR00025.1 | Eubacterium_callanderi_strain_DSM_3662_16S_ribosomal_RNA |
| SEQ ID NO: 260 | STR00025.2 | Eubacterium_callanderi_strain_DSM_3662_16S_ribosomal_RNA |
| SEQ ID NO: 261 | STR00025.3 | Eubacterium_callanderi_strain_DSM_3662_16S_ribosomal_RNA |
| SEQ ID NO: 262 | STR00025.4 | Eubacterium_callanderi_strain_DSM_3662_16S_ribosomal_RNA |
| SEQ ID NO: 263 | STR00075 | Flavonifractor_plautii_strain_265_16S_ribosomal_RNA |
| SEQ ID NO: 264 | STR00075.1 | Flavonifractor_plautii_strain_265_16S_ribosomal_RNA |
| SEQ ID NO: 265 | STR00075.2 | Flavonifractor_plautii_strain_265_16S_ribosomal_RNA |
| SEQ ID NO: 266 | STR00076 | Blautia_hominis_strain_KB1_16S_ribosomal_RNA |
| SEQ ID NO: 267 | STR00076.1 | Blautia_hominis_strain_KB1_16S_ribosomal_RNA |
| SEQ ID NO: 268 | STR00076.2 | Blautia_hominis_strain_KB1_16S_ribosomal_RNA |
| SEQ ID NO: 269 | STR00076.3 | Blautia_hominis_strain_KB1_16S_ribosomal_RNA |
| SEQ ID NO: 270 | STR00076.4 | Blautia_hominis_strain_KB1_16S_ribosomal_RNA |
| SEQ ID NO: 271 | STR00081 | Anaerotruncus_colihominis_strain_WAL_14565_16S_ribosomal_RNA |
| SEQ ID NO: 272 | STR00081.1 | Anaerotruncus_colihominis_strain_WAL_14565_16S_ribosomal_RNA |
| SEQ ID NO: 273 | STR00081.2 | Anaerotruncus_colihominis_strain_WAL_14565_16S_ribosomal_RNA |
| SEQ ID NO: 274 | STR00083 | Murimonas_intestini_strain_SRB-530-5-H_16S_ribosomal_RNA |
| SEQ ID NO: 275 | STR00083.1 | Murimonas_intestini_strain_SRB-530-5-H_16S_ribosomal_RNA |
| SEQ ID NO: 276 | STR00083.2 | Murimonas_intestini_strain_SRB-530-5-H_16S_ribosomal_RNA |
| SEQ ID NO: 277 | STR00083.3 | Murimonas_intestini_strain_SRB-530-5-H_16S_ribosomal_RNA |
| SEQ ID NO: 278 | STR00083.4 | Murimonas_intestini_strain_SRB-530-5-H_16S_ribosomal_RNA |
| SEQ ID NO: 279 | STR00092 | Erysipelatoclostridium_ramosum_strain_JCM_1298_16S_ribosomal_RNA |
| SEQ ID NO: 280 | STR00092.1 | Erysipelatoclostridium_ramosum_strain_JCM_1298_16S_ribosomal_RNA |
| SEQ ID NO: 281 | STR00092.2 | Erysipelatoclostridium_ramosum_strain_JCM_1298_16S_ribosomal_RNA |
| SEQ ID NO: 282 | STR00092.3 | Erysipelatoclostridium_ramosum_strain_JCM_1298_16S_ribosomal_RNA |
| SEQ ID NO: 283 | STR00092.4 | Erysipelatoclostridium_ramosum_strain_JCM_1298_16S_ribosomal_RNA |
| SEQ ID NO: 284 | STR00096 | Faecalicatena_orotica_strain_DSM_1287_16S_ribosomal_RNA |
| SEQ ID NO: 285 | STR00096.1 | Faecalicatena_orotica_strain_DSM_1287_16S_ribosomal_RNA |
| SEQ ID NO: 286 | STR00096.2 | Faecalicatena_orotica_strain_DSM_1287_16S_ribosomal_RNA |
| SEQ ID NO: 287 | STR00096.3 | Faecalicatena_orotica_strain_DSM_1287_16S_ribosomal_RNA |
| SEQ ID NO: 288 | STR00096.4 | Faecalicatena_orotica_strain_DSM_1287_16S_ribosomal_RNA |
| SEQ ID NO: 289 | STR00097.5 | Emergencia_timonensis_strain_SN18_16S_ribosomal_RNA |
| SEQ ID NO: 290 | STR00097.1 | Emergencia_timonensis_strain_SN18_16S_ribosomal_RNA |
| SEQ ID NO: 291 | STR00097.2 | Emergencia_timonensis_strain_SN18_16S_ribosomal_RNA |
| SEQ ID NO: 292 | STR00105 | Dorea_longicatena_strain_111-35_16S_ribosomal_RNA |
| SEQ ID NO: 293 | STR00105.2 | Dorea_longicatena_strain_111-35_16S_ribosomal_RNA |
| SEQ ID NO: 294 | STR00132 | Eisenbergiella_tayi_strain_B086562_16S_ribosomal_RNA |
| SEQ ID NO: 295 | STR00132.1 | Eisenbergiella_tayi_strain_B086562_16S_ribosomal_RNA |
| SEQ ID NO: 296 | STR00105.4 | Dorea_longicatena_strain_111-35_16S_ribosomal_RNA |
| SEQ ID NO: 297 | STR00105.5 | Dorea_longicatena_strain_111-35_16S_ribosomal_RNA |
| SEQ ID NO: 298 | STR00107 | [Clostridium]_aldenense_strain_RMA_9741_16S_ribosomal_RNA |
| SEQ ID NO: 299 | STR00107.1 | [Clostridium]_aldenense_strain_RMA_9741_16S_ribosomal_RNA |
| SEQ ID NO: 300 | STR00107.2 | [Clostridium]_aldenense_strain_RMA_9741_16S_ribosomal_RNA |
| SEQ ID NO: 301 | STR00107.3 | [Clostridium]_aldenense_strain_RMA_9741_16S_ribosomal_RNA |
| SEQ ID NO: 302 | STR00107.4 | [Clostridium]_aldenense_strain_RMA_9741_16S_ribosomal_RNA |
| SEQ ID NO: 303 | STR00132.8 | Eisenbergiella_tayi_strain_B086562_16S_ribosomal_RNA |
| SEQ ID NO: 304 | STR00132.2 | Eisenbergiella_tayi_strain_B086562_16S_ribosomal_RNA |
| SEQ ID NO: 305 | STR00132.3 | Eisenbergiella_tayi_strain_B086562_16S_ribosomal_RNA |
| SEQ ID NO: 306 | STR00132.6 | Eisenbergiella_tayi_strain_B086562_16S_ribosomal_RNA |
| SEQ ID NO: 307 | STR00139 | [Clostridium]_scindens_strain_ATCC_35704_16S_ribosomal_RNA |
| SEQ ID NO: 308 | STR00139.1 | [Clostridium]_scindens_strain_ATCC_35704_16S_ribosomal_RNA |
| SEQ ID NO: 309 | STR00096.8 | Faecalicatena_orotica_strain_DSM_1287_16S_ribosomal_RNA |
| SEQ ID NO: 310 | STR00096.9 | Faecalicatena_orotica_strain_DSM_1287_16S_ribosomal_RNA |
| SEQ ID NO: 311 | STR00139.2 | [Clostridium]_scindens_strain_ATCC_35704_16S_ribosomal_RNA |
| SEQ ID NO: 312 | STR00096.7 | Faecalicatena_orotica_strain_DSM_1287_16S_ribosomal_RNA |
| SEQ ID NO: 313 | STR00096.10 | Faecalicatena_orotica_strain_DSM_1287_16S_ribosomal_RNA |
| SEQ ID NO: 314 | STR00097.6 | Emergencia_timonensis_strain_SN18_16S_ribosomal_RNA |
| SEQ ID NO: 315 | STR00097 | Emergencia_timonensis_strain_SN18_16S_ribosomal_RNA |
| SEQ ID NO: 316 | STR00105.9 | Dorea_longicatena_strain_111-35_16S_ribosomal_RNA |
| SEQ ID NO: 317 | STR00105.1 | Dorea_longicatena_strain_111-35_16S_ribosomal_RNA |
| SEQ ID NO: 318 | STR00105.10 | Dorea_longicatena_strain_111-35_16S_ribosomal_RNA |
| SEQ ID NO: 319 | STR00105.3 | Dorea_longicatena_strain_111-35_16S_ribosomal_RNA |
| SEQ ID NO: 320 | STR00105.11 | Dorea_longicatena_strain_111-35_16S_ribosomal_RNA |
| SEQ ID NO: 321 | STR00105.8 | Dorea_longicatena_strain_111-35_16S_ribosomal_RNA |
| SEQ ID NO: 322 | STR00107.6 | [Clostridium]_aldenense_strain_RMA_9741_16S_ribosomal_RNA |
| SEQ ID NO: 323 | STR00107.7 | [Clostridium]_aldenense_strain_RMA_9741_16S_ribosomal_RNA |
| SEQ ID NO: 324 | STR00107.8 | [Clostridium]_aldenense_strain_RMA_9741_16S_ribosomal_RNA |
| SEQ ID NO: 325 | STR00107.9 | [Clostridium]_aldenense_strain_RMA_9741_16S_ribosomal_RNA |
| SEQ ID NO: 326 | STR00107.10 | [Clostridium]_aldenense_strain_RMA_9741_16S_ribosomal_RNA |
| SEQ ID NO: 327 | STR00132.9 | Eisenbergiella_tayi_strain_B086562_16S_ribosomal_RNA |
| SEQ ID NO: 328 | STR00132.11 | Eisenbergiella_tayi_strain_B086562_16S_ribosomal_RNA |
| SEQ ID NO: 329 | STR00132.10 | Eisenbergiella_tayi_strain_B086562_16S_ribosomal_RNA |
| SEQ ID NO: 330 | STR00132.7 | Eisenbergiella_tayi_strain_B086562_16S_ribosomal_RNA |
| SEQ ID NO: 331 | STR00139.3 | [Clostridium]_scindens_strain_ATCC_35704_16S_ribosomal_RNA |
| SEQ ID NO: 332 | STR00132.12 | [Clostridium]_scindens_strain_ATCC_35704_16S_ribosomal_RNA |
| SEQ ID NO: 333 | STR00139.7 | [Clostridium]_scindens_strain_ATCC_35704_16S_ribosomal_RNA |
| SEQ ID NO: 334 | STR00139.5 | [Clostridium]_scindens_strain_ATCC_35704_16S_ribosomal_RNA |
| SEQ ID NO: 335 | STR00139.6 | [Clostridium]_scindens_strain_ATCC_35704_16S_ribosomal_RNA |
| SEQ ID NO: 336 | STR00143 | Blautia_obeum_ATCC_29174_16S_ribosomal_RNA |
| SEQ ID NO: 337 | STR00143.1 | Blautia_obeum_ATCC_29174_16S_ribosomal_RNA |
| SEQ ID NO: 338 | STR00143.2 | Blautia_obeum_ATCC_29174_16S_ribosomal_RNA |
| SEQ ID NO: 339 | STR00143.3 | Blautia_obeum_ATCC_29174_16S_ribosomal_RNA |
| SEQ ID NO: 340 | STR00143.4 | Blautia_obeum_ATCC_29174_16S_ribosomal_RNA |
| SEQ ID NO: 341 | STR00143.5 | Blautia_obeum_ATCC_29174_16S_ribosomal_RNA |
| SEQ ID NO: 342 | STR00144 | Escherichia fergusonii ATCC 35469 16S ribosomal RNA |
| SEQ ID NO: 343 | STR00145 | Bifidobacterium dentiumSTRain B764 16S ribosomal RNA |
| SEQ ID NO: 344 | STR00146 | Streptococcus parasanguinis ATCC 15912 16S ribosomal RNA |
| SEQ ID NO: 345 | STR00147 | [Clostridium] spiroforme DSM 1552 16S ribosomal RNA |
| SEQ ID NO: 346 | STR00148 | Roseburia hominis A2-183 16S ribosomal RNA |
| SEQ ID NO: 347 | STR00149 | Holdemania filiformisSTRain J1-31B-1 16S ribosomal RNA |
| SEQ ID NO: 348 | STR00150 | [Clostridium] symbiosumSTRain ATCC 14940 16S ribosomal RNA |
| SEQ ID NO: 349 | STR00151 | Oscillibacter valericigenesSTRain Sjm18-20 16S ribosomal RNA |
| SEQ ID NO: 350 | STR00152 | Emergencia timonensisSTRain SN18 16S ribosomal RNA |
| SEQ ID NO: 351 | STR00153 | [Clostridium] leptumSTRain DSM 753 16S ribosomal RNA |
| SEQ ID NO: 352 | STR00154 | Flavonifractor plautiiSTRain 265 16S ribosomal RNA |

### EMBODIMENTS

[0275] Embodiment 1. A composition comprising a purified population of bacteria, wherein the purified population of bacteria comprises one or more bacteria having a 16S rDNA sequence that is at least 85%, at least 90%, at least 95%, at least 96%, at least 97%, at least 98%, at least 99%, or 100% identical to a 16S rDNA sequence set forth in SEQ ID NOs: 1-341.

[0276] Embodiment 2. A composition comprising a purified population of bacteria, wherein the purified population of bacteria comprises Eubacterium maltosivorans, Clostridium aldenense, Clostridium bolteae, Clostridium glycyrrhizinilyticum, Clostridium hylemonae, Clostridium innocuum, Clostridium lavalense, Clostridium scindens, Clostridium spiroforme, Clostridium symbiosum, Eubacterium rectale, Ruminococcus gnavus, Ruminococcus torques, Absiella dolichum, Agathobaculum desmolans, Akkermansia muciniphila, Alistipes finegoldii, Alistipes shahii, Anaerofustis stercorihominis, Anaeromassilibacillus senegalensis, Anaerostipes caccae, Anaerotruncus colihominis, Bacteroides caccae, Faecalibacterium prausnitzii, Faecalicatena contorta, Faecalicatena orotica, Flavonifractor plautii, Gemmiger formicilis, Harryflintia acetispora, Holdemania filiformis, Holdemania massiliensis, Intestinimonas butyriciproducens, Lachnospira pectinoschiza, Lachnospiraceae bacterium 5 1 57FAA, Lactobacillus fermentum, Lactonifactor longoviformis, Longibaculum muris, Longicatena caecimuris, Murimonas intestina, Oscillibacter ruminantium, Bacteroides eggerthii, Bacteroides faecis, Bacteroides intestinalis, Bacteroides koreensis, Bacteroides kribbi, Bacteroides salyersiae, Bacteroides uniformis, Bacteroides vulgatus, Bacteroides xylanisolvens, Barnesiella intestinihominis, Bifidobacterium dentium, Bifidobacterium longum, Bifidobacterium stercoris, Blautia coccoides, Blautia hominis, Blautia hydrogenotrophica, Blautia luti, Blautia obeum, Blautia producta, Blautia wexlerae, Butyricimonas faecihominis, Cellulosilyticum lentocellum, Clostridium butyricum, Ruthenibacterium lactatiformans, Sellimonas intestinalis, Shigella flexneri, Terrisporobacter mayombei, Terrisporobacter petrolearius, Turicibacter sanguinis, Tyzzerella nexilis, Clostridium disporicum, Clostridium subterminale, Clostridium tertium, Collinsella aerofaciens, Coprococcus comes, Coprococcus eutactus, Dorea longicatena, Drancourtella massiliensis, Eggerthella lenta, Eisenbergiella tayi, Emergencia timonensis, Erysipelatoclostridium ramosum, Eubacterium callanderi, Paeniclostridium sordellii, Parabacteroides distasonis, Parabacteroides merdae, Paraclostridium bifermentans, Peptostreptococcus stomatis, Robinsoniella peoriensis, Romboutsia timonensis, Roseburia intestinalis, Roseburia inulinivorans, Ruminococcus albus, Ruminococcus bromii, Ruminococcus faecis, Ruminococcus lactaris, or combinations thereof.

[0277] Embodiment 3. A composition comprising a purified population of bacteria, wherein the purified population of bacteria comprises a species selected from FIG. 1 or combinations thereof.

[0278] Embodiment 4. The composition of any one of embodiments 1 to 3, wherein the purified population of bacteria comprises at least two, three, four, five, six, seven, eight, nine, ten, eleven, twelve, thirteen, fourteen, fifteen, sixteen, seventeen, eighteen, nineteen, twenty, twenty-one, twenty-two, twenty-three, twenty-four, twenty-five, twenty-six, twenty-seven, twenty-eight, twenty-nine, thirty, or more bacteria.

[0279] Embodiment 5. A composition comprising a purified population of bacteria, wherein the composition comprises the purified population of bacteria selected from the DE1-DE54 recited in FIG. 1

[0280] Embodiment 6. The composition of any one of embodiments 1-5, wherein the composition can decrease an infection, including an infection caused by an ESKAPE pathogen (Enterococcus faecium, Staphylococcus aureus, Klebsiella pneumoniae, Acinetobacter baumannii, Pseudomonas aeruginosa, and Enterobacter spp.) Embodiment 7. The composition of any one of embodiments 1 to 6, wherein the purified population of bacteria can decrease the number and/or relative abundance of antibiotic resistant bacteria and/or an ESKAPE pathogen in a gastrointestinal tract of a subject compared to a reference (e.g., composition that does not include one or more of the bacteria disclosed herein).

[0281] Embodiment 8. The composition of any one of embodiments 1 to 7, wherein the number of antibiotic resistant bacteria is measured as a colony forming unit per gram of a sample obtained from the subject.

[0282] Embodiment 9. The composition of any one of embodiments 1 to 8, wherein:
[0283] (i) the antibiotic resistant bacteria comprise vancomycin-resistant Enterococci or carbapenem-resistant Enterobacteriaceae or a combination thereof;
[0284] (ii) the ESKAPE pathogen comprises Enterococcus faecium, Staphylococcus aureus, Klebsiella pneumoniae, Acinetobacter baumannii, Pseudomonas aeruginosa, and Enterobacter spp., or a combination thereof; or
[0285] (iii) the antibiotic resistant bacteria and ESKAPE pathogen are selected from (i) and (ii).

[0286] Embodiment 10. The composition of any one of embodiments 1 to 9, wherein one or more bacteria of the purified population of bacteria can compete for carbon-sources with the antibiotic resistant bacteria.

[0287] Embodiment 11. The composition of any one of embodiments 1 to 10, wherein the purified population of bacteria can improve epithelial barrier integrity, reduce inflammation, and/or reduce mucositis in a gastrointestinal tract of a subject compared to a reference (e.g., a corresponding reference in a subject that did not receive the composition disclosed herein or corresponding reference in the subject prior to the administration of the composition).

[0288] Embodiment 12. The composition of any one of embodiments 1 to 11, wherein the purified population of bacteria can decrease mortality due to an invasive infection in a subject compared to a reference (e.g., a corresponding reference in a subject that did not receive the composition disclosed herein or corresponding reference in the subject prior to the administration of the composition).

[0289] Embodiment 13. The composition of embodiment 12, wherein the invasive infection in the subject is an antibiotic resistant infection.

[0290] Embodiment 14. The composition of any one of embodiments 1 to 13, wherein the purified population of bacteria can reduce transplantation-related complications in a subject compared to a reference (e.g., a corresponding reference in a subject that did not receive the composition disclosed herein or corresponding reference in the subject prior to the administration of the composition).

[0291] Embodiment 15. The composition of any one of embodiments 1 to 14, wherein the purified population of bacteria can increase the overall survival and/or progression-free survival of a subject compared to a reference (e.g., composition that does not include one or more of the bacteria disclosed herein).

[0292] Embodiment 16. The composition of any one of embodiments 1 to 15, wherein the purified population of bacteria can modulate a biological activity, wherein the biological activity comprises short-chain fatty acid production, medium-chain fatty acid production, tryptophan metabolite production, fucosidase activity, Wnt activation, anti-IL-8 activity, carbon source utilization, bile acid metabolism, or combinations thereof.

[0293] Embodiment 17. The composition of any one of embodiments 1 to 16, wherein the purified population of bacteria comprises one or more bacteria having one or more features selected from the group consisting of:
[0294] (1) capable of reducing VRE and CRE carriage and restore colonization resistance in the GI tract of a mammal;
[0295] (2) capable of protecting the epithelial barrier from cytokine-mediated inflammatory damage; and
[0296] (3) capable of reducing inflammation in the epithelial barrier, as measured by IL-8 secretion in vitro, and in the colonic lamina propria of mice.

[0297] Embodiment 18. The composition of any one of embodiments 1 to 17, wherein the purified population of bacteria comprises one or more bacteria having one or more features selected from the group consisting of:
[0298] (i) capable of engrafting when administered to a subject, (ii) capable of having anti-inflammatory activity, (iii) not capable of inducing pro-inflammatory activity, (iv) capable of producing a secondary bile acid (7α-deydroxylase and bile salt hydrolase activity), (v) capable of producing a tryptophan metabolite (e.g., indole, 3-methyl indole, indolepropionic acid), (vi) capable of restoring epithelial integrity as determined by a primary epithelial cell monolayer barrier integrity assay, (vii) capable of being associated with remission of infection or GvHD following HSCT, (viii) capable of not being associated with clinical non-remission of infection or GvHD following HSCT, (ix) capable of producing a short-chain fatty acid (e.g., butyrate, propionate), (x) capable of inhibiting a HDAC activity, (xi) capable of producing a medium-chain fatty acid (e.g., valerate, hexanoate), (xii) capable of expressing catalase activity, (xiii) capable of having alpha-fucosidase activity, (xiv) capable of inducing Wnt activation, (xv) capable of producing a B vitamin, (xvi) capable of reducing fecal calprotectin level, (xviii) not capable of activating a toll-like receptor pathway (e.g., TLR4 or TLR5), (xix) capable of activating a toll-like receptor pathway (e.g., TLR2), or (xx) any combination thereof, (xxi) capable of restoring colonization resistance, (xxii) capable of a broad range of carbon source utilization, (xxiii) capable of reducing VRE pathogen carriage, (xxiv) capable of reducing CRE pathogen carriage; (xxv) capable of reducing expression of claudin-2, (xxvi) capable of being associated with the healthy human gut microbiota, (xxvii) capable of not being associated with toxin and hemolysin genes associated with Clostridial pathogens and no significant cytopathic effects in vitro, (xxviii) susceptible to multiple clinically relevant antibiotics, (xxix) capable of not being associated with genes that are both likely responsible for the observed antibiotic resistances and transmissible, and (xxx) any combination thereof.

[0299] Embodiment 19. The composition of embodiment 16, wherein the biological activity is modulated in vivo.

[0300] Embodiment 20. The composition of embodiment 16, wherein the biological activity is modulated in vitro (e.g., a culture or a synthetic gastrointestinal system).

[0301] Embodiment 21. The composition of any one of embodiments 16 to 20, wherein short-chain fatty acid production is increased by at least 10%, at least 20%, at least 30%, at least 40%, at least 50%, at least 60%, at least 70%, at least 80%, or at least 90% compared to a reference (e.g., composition that does not include one or more of the bacteria disclosed herein).

[0302] Embodiment 22. The composition of any one of embodiments 16 to 21, wherein medium-chain fatty acid production is increased by at least 10%, at least 20%, at least 30%, at least 40%, at least 50%, at least 60%, at least 70%, at least 80%, or at least 90% compared to a reference (e.g., composition that does not include one or more of the bacteria disclosed herein).

[0303] Embodiment 23. The composition of any one of embodiments 16 to 22, wherein tryptophan metabolite production is increased by at least 10%, at least 20%, at least 30%, at least 40%, at least 50%, at least 60%, at least 70%, at least 80%, or at least 90% compared to a reference (e.g., composition that does not include one or more of the bacteria disclosed herein).

[0304] Embodiment 24. The composition of any one of embodiments 16 to 23, wherein fucosidase activity is increased by at least 10%, at least 20%, at least 30%, at least 40%, at least 50%, at least 60%, at least 70%, at least 80%, or at least 90% compared to a reference (e.g., composition that does not include one or more of the bacteria disclosed herein).

[0305] Embodiment 25. The composition of any one of embodiments 16 to 24, wherein Wnt activation is increased by at least 10%, at least 20%, at least 30%, at least 40%, at least 50%, at least 60%, at least 70%, at least 80%, or at least 90% compared to a reference (e.g., composition that does not include one or more of the bacteria disclosed herein).

[0306] Embodiment 26. The composition of any one of embodiments 16 to 25, wherein anti-IL-8 activity is increased by at least 10%, at least 20%, at least 30%, at least 40%, at least 50%, at least 60%, at least 70%, at least 80%, or at least 90% compared to a reference (e.g., composition that does not include one or more of the bacteria disclosed herein).

[0307] Embodiment 27. The composition of any one of embodiments 1 to 26, wherein the purified population of bacteria can augment the number and/or relative abundance of spore-forming bacteria in a microbiome of a subject.

[0308] Embodiment 28. The composition of any one of embodiments 1 to 27, wherein the purified population of bacteria can augment the number and/or relative abundance of non-pathogenic, commensal non-spore-forming bacteria in a microbiome of a subject.

[0309] Embodiment 29. The composition of any one of embodiments 1 to 28, wherein one or more bacteria of the purified population of bacteria are capable of being engrafted into a subject's microbiome when administered to the subject, wherein said engraftment is long-term or transient engraftment.

[0310] Embodiment 30. A pharmaceutical formulation comprising the composition of any one of embodiments 1 to 28 and a pharmaceutically acceptable excipient.

[0311] Embodiment 31. The pharmaceutical formulation of embodiment 30, wherein the excipient comprises glycerol.

[0312] Embodiment 32. The pharmaceutical formulation of embodiment 30 or 31, wherein the composition is lyophilized.

[0313] Embodiment 33. The pharmaceutical formulation of any one of embodiments 30 to 32, wherein the composition is formulated for oral delivery.

[0314] Embodiment 34. A method of treating a disease or disorder associated with an allogeneic immune response in a subject in need thereof, comprising administering to the subject an effective amount of a composition of any one of embodiments 1 to 29 or a pharmaceutical formulation of any one of embodiments 30 to 33.

[0315] Embodiment 35. The method of embodiment 34, wherein the allogeneic immune response is caused by an allogeneic hematopoietic stem cell transplantation (allo-HSCT) or an allogeneic organ transplantation.

[0316] Embodiment 36. The method of embodiment 34 or 35, wherein the disease or disorder associated with an allogenic immune response comprises graft-versus-host-disease (GvHD), viral infection or reactivation, invasive infection, blood stream infection, inflammation, or combinations thereof.

[0317] Embodiment 37. The method of embodiment 36, wherein the GvHD comprises an acute graft versus host disease (aGvHD) or a chronic graft versus host disease (cGvHD).

[0318] Embodiment 38. The method of any one of embodiments 34 to 37, wherein the subject suffers from a cancer.

[0319] Embodiment 39. The method of embodiment 38, wherein the cancer comprises acute myeloid leukemia (AML), acute lymphoblastic leukemia (ALL), myelodysplastic syndromes (MDS), myeloproliferative neoplasms (MPN), or combinations thereof

[0320] Embodiment 40. A method of treating, reducing, or alleviating a symptom associated with chemotherapy in a subject in need thereof, comprising administering to the subject an effective amount of a composition of any one of embodiments 1 to 29 or a pharmaceutical formulation of any one of embodiments 30 to 33.

[0321] Embodiment 41. The method of embodiment 40, wherein the symptom associated with chemotherapy comprises weight loss or an increase in the level of a proinflammatory mediator within a gastrointestinal tract of the subject.

[0322] Embodiment 42. The method of embodiment 41, wherein the weight loss is reduced by at least 10%, at least 20%, at least 30%, at least 40%, at least 50%, at least 60%, at least 70%, at least 80%, or at least 90% compared to a reference (e.g., corresponding value in a subject that did not receive the composition disclosed herein or corresponding value in the subject prior to the administration of the composition).

[0323] Embodiment 43. The method of embodiment 41, wherein the level of a proinflammatory mediator is reduced by at least 10%, at least 20%, at least 30%, at least 40%, at least 50%, at least 60%, at least 70%, at least 80%, or at least 90% compared to a reference (e.g., corresponding value in a subject that did not receive the composition disclosed herein or corresponding value in the subject prior to the administration of the composition).

[0324] Embodiment 44. The method of any one of embodiments 41 to 43, wherein the proinflammatory mediator comprises IFN-γ, IL-1b, IL-2, IL-6, IL-12, CXCL5, IL-17, CXCL1, VEGF, TNF-α, or combinations thereof.

[0325] Embodiment 45. The method of embodiment 44, wherein the level of a proinflammatory T cell is reduced by at least 10%, at least 20%, at least 30%, at least 40%, at least 50%, at least 60%, at least 70%, at least 80%, or at least 90% compared to a reference (e.g., corresponding value in a subject that did not receive the composition disclosed herein or corresponding value in the subject prior to the administration of the composition).

[0326] Embodiment 46. The method of embodiment 45, wherein the proinflammatory T cell comprises a CD8⁺ T cell.

[0327] Embodiment 47. The method of embodiment 46, wherein the level of an anti-inflammatory T cell is reduced by at least 10%, at least 20%, at least 30%, at least 40%, at least 50%, at least 60%, at least 70%, at least 80%, or at least 90% compared to a reference (e.g., corresponding value in a subject that did not receive the composition disclosed herein or corresponding value in the subject prior to the administration of the composition).

[0328] Embodiment 48. The method of embodiment 47, wherein the anti-inflammatory T cell comprises a FOXP3⁺ CD4⁺ T cell.

[0329] Embodiment 49. A method of preventing, reducing, or treating rejection in a subject undergoing transplantation (e.g., either HSCT or organ), comprising administering to the subject an effective amount of a composition of any one of embodiments 1 to 29 or a pharmaceutical formulation of any one of embodiments 30 to 33.

[0330] Embodiment 50. The method of embodiment 49, wherein the composition or the pharmaceutical formulation is administered to the subject prior to, during, and/or after the transplantation.

[0331] Embodiment 51. A method of modulating a biological activity in a subject in need thereof, comprising administering to the subject an effective amount of a composition of any one of embodiments 1 to 29 or a pharmaceutical formulation of any one of embodiments 30 to 33, wherein the biological activity comprises short-chain fatty acid production, medium-chain fatty acid production, tryptophan metabolite production, fucosidase activity, Wnt activation, anti-IL-8 activity, or combinations thereof.

[0332] Embodiment 52. The method of embodiment 51, wherein short-chain fatty acid production is increased by at least 10%, at least 20%, at least 30%, at least 40%, at least 50%, at least 60%, at least 70%, at least 80%, or at least 90% compared to a reference (e.g., corresponding activity in a subject that did not receive the composition disclosed herein or corresponding activity in the subject prior to the administration of the composition).

[0333] Embodiment 53. The method of embodiment 51, wherein medium-chain fatty acid production is increased by at least 10%, at least 20%, at least 30%, at least 40%, at least 50%, at least 60%, at least 70%, at least 80%, or at least 90% compared to a reference (e.g., corresponding activity in a subject that did not receive the composition disclosed herein or corresponding activity in the subject prior to the administration of the composition).

[0334] Embodiment 54. The method of embodiment 51, wherein tryptophan metabolite production is increased by at least 10%, at least 20%, at least 30%, at least 40%, at least 50%, at least 60%, at least 70%, at least 80%, or at least 90% compared to a reference (e.g., corresponding activity in a subject that did not receive the composition disclosed herein or corresponding activity in the subject prior to the administration of the composition).

[0335] Embodiment 55. The method of embodiment 51, wherein fucosidase activity is increased by at least 10%, at least 20%, at least 30%, at least 40%, at least 50%, at least 60%, at least 70%, at least 80%, or at least 90% compared to a reference (e.g., corresponding activity in a subject that did not receive the composition disclosed herein or corresponding activity in the subject prior to the administration of the composition).

[0336] Embodiment 56. The method of embodiment 51, wherein Wnt activation is increased by at least 10%, at least 20%, at least 30%, at least 40%, at least 50%, at least 60%, at least 70%, at least 80%, or at least 90% compared to a reference (e.g., corresponding activity in a subject that did not receive the composition disclosed herein or corresponding activity in the subject prior to the administration of the composition).

[0337] Embodiment 57. The method of embodiment 51, wherein anti-IL-8 activity is increased by at least 10%, at least 20%, at least 30%, at least 40%, at least 50%, at least 60%, at least 70%, at least 80%, or at least 90% compared to a reference (e.g., corresponding activity in a subject that did not receive the composition disclosed herein or corresponding activity in the subject prior to the administration of the composition).

[0338] Embodiment 58. A method of decreasing the number and/or relative abundance of antibiotic resistant bacteria in a gastrointestinal tract of a subject in need thereof, comprising administering to the subject an effective amount of a composition of any one of embodiments 1 to 29 or a pharmaceutical formulation of any one of embodiments 30 to 33.

[0339] Embodiment 59. The method of embodiment 58, wherein the number and/or abundance of antibiotic resistant bacteria is reduced by at least 10%, at least 20%, at least 30%, at least 40%, at least 50%, at least 60%, at least 70%, at least 80%, or at least 90% compared to a reference (e.g., corresponding number in a subject that did not receive the composition disclosed herein or corresponding number in the subject prior to the administration of the composition).

[0340] Embodiment 60. The method of embodiment 58 or 59, wherein the antibiotic resistant bacteria comprise vancomycin-resistant Enterococci or carbapenem-resistant Enterobacteriaceae.

[0341] Embodiment 61. A method of improving epithelial barrier status, reducing inflammation, and/or reducing mucositis in a gastrointestinal tract of a subject in need thereof, comprising administering to the subject an effective amount of a composition of any one of embodiments 1 to 29 or a pharmaceutical formulation of any one of embodiments 30 to 33.

[0342] Embodiment 62. The method of embodiment 61, wherein the epithelial barrier status in the gastrointestinal tract of the subject is improved by at least 5%, at least 10%, at least 20%, at least 30%, at least 40%, at least 50%, at least 60%, at least 70%, at least 80%, or at least 90% compared to a reference (e.g., corresponding value in a subject that did not receive the composition disclosed herein or corresponding activity in the subject prior to the administration of the composition).

[0343] Embodiment 63. The method of embodiment 61, wherein the inflammation in the gastrointestinal tract of the subject is reduced by at least 5%, at least 10%, at least 20%, at least 30%, at least 40%, at least 50%, at least 60%, at least 70%, at least 80%, or at least 90% compared to a reference (e.g., corresponding value in a subject that did not receive the composition disclosed herein or corresponding activity in the subject prior to the administration of the composition).

[0344] Embodiment 64. The method of embodiment 61, wherein the mucositis in the gastrointestinal tract of the subject is reduced by at least 5%, at least 10%, at least 20%, at least 30%, at least 40%, at least 50%, at least 60%, at least 70%, at least 80%, or at least 90% compared to a reference (e.g., corresponding value in a subject that did not receive the composition disclosed herein or corresponding activity in the subject prior to the administration of the composition).

[0345] Embodiment 65. A method of decreasing mortality due to an invasive infection in a subject in need thereof, comprising administering to the subject an effective amount of a composition of any one of embodiments 1 to 29 or a pharmaceutical formulation of any one of embodiments 30 to 33, wherein the subject is undergoing transplantation.

[0346] Embodiment 66. The method of embodiment 65, wherein the invasive infection in the subject is an antibiotic resistant infection.

[0347] Embodiment 67. A method of reducing transplantation-related complications in a subject in need thereof, comprising administering to the subject an effective amount of a composition of any one of embodiments 1 to 29 or a pharmaceutical formulation of any one of embodiments 30 to 33, wherein the subject is undergoing transplantation.

[0348] Embodiment 68. A method of increasing the overall survival and/or progression-free survival of a subject in need thereof, comprising administering to the subject an effective amount of a composition of any one of embodiments 1 to 29 or a pharmaceutical formulation of any one of embodiments 30 to 33, wherein the subject is undergoing transplantation.

[0349] Embodiment 69. The method of any one of embodiments 34 to 68, wherein the subject is undergoing or has undergone transplantation.

[0350] Embodiment 70. The method of embodiment 69, wherein the transplantation is an allogeneic hematopoietic stem cell transplantation (allo-HSCT) or an allogeneic organ transplantation.

[0351] Embodiment 71. The method of any one of embodiments 34 to 70, wherein the subject suffers from a cancer.

[0352] Embodiment 72. The method of embodiment 71, wherein the cancer comprises acute myeloid leukemia (AML), acute lymphoblastic leukemia (ALL), myelodysplastic syndromes (MDS), myeloproliferative neoplasms (MPN), or combinations thereof.

[0353] The following examples are offered by way of illustration and not by way of limitation. The contents of all references cited throughout this application are expressly incorporated herein by reference.

### EXAMPLES

### Example 1: Designing Bacterial Compositions and Screening for Functional Properties

[0354] In designing the bacterial compositions of the present disclosure, the compositions were constructed to have one or more of the following features: (1) include phylogenetically diverse species to enable reduction of pathogen carriage and restoration of colonization resistance; (2) restore integrity of the gastrointestinal epithelial barrier through provision of microbially associated metabolites; (3) reduce inflammation in the gastrointestinal epithelial barrier and lamina propria. To do so, bacterial species exhibiting one or more of the following properties were considered in designing the bacterial compositions: (i) ability to utilize a carbon source used by a pathogenic organism, such as but not limited to Enterococcus and Enterobacteriaceae species and ESKAPE pathogens (including: Enterococcus faecium, Staphylococcus aureus, Klebsiella pneumoniae, Acinetobacter baumannii, Pseudomonas aeruginosa, and Enterobacter spp.) Enterococcus species including, but not limited to, Enterococcus faecalis and Enterococcus faecium, Enterobacteriaceae species including, but not limited to Klebsiella pneumonia, or such species that are resistant to vancomycin or carbapenems, drug resistant or multi-drug resistant (MDROs) including VRE, CRE (Klebsiella pneumonia, Klebsiella oxytoca, Klebsiella aerogenes, Enterococcus species), extended spectrum beta-lactamase (ESBLs) producing bacteria (E. coli, Klebsiella species), or methicillin-resistant Staphylococcus aureus (MRSA); (ii) ability to engraft when administered to a subject; (iii) ability to produce short-chain fatty acids; (iv) ability to produce medium-chain fatty acids; (v) ability to produce tryptophan metabolites; (vi) ability to inhibit histone deacetylase (HDAC) activity; (vii) ability to decrease IL-8 secretion in intestinal epithelial cells (IECs) treated with TNF-α; (viii) lack of induction of IL8 secretion in intestinal epithelial cells (IECs) in the absence of TNF-α; and (ix) combinations thereof. Bacterial species with pro-inflammatory activity (e.g., able to induce IL-8 secretion in IECs) were specifically excluded. As described further below, individual bacterial strains were evaluated using a panel of in vitro assays for functions supporting one or more of the desired properties noted above.

[0355] The criteria resulted in greater than 60 candidate bacterial compositions, including more than 150 species. Candidate compositions were screened in vitro and in vivo for their ability to: (1) reduce VRE and CRE carriage and restore colonization resistance in the GI tract of mice; (2) protect the epithelial barrier from cytokine-mediated inflammatory damage (e.g., IFN-γ mediated); (3) reduce inflammation in the epithelial barrier, as measured by IL-8 secretion and modulation of inflammatory pathway gene expression in vitro, and in the colonic lamina propria of mice, e.g., as measured through an increased ratio of Treg cells to pro-inflammatory Th1 and Th17 cells.

[0356] The designed bacterial compositions were mixed in equal ratios at ˜1-5×10⁷ colony forming units (CFU)/mL of vegetative bacteria and ˜1×10⁴-1×10⁵ CFU/mL of spore forming bacteria (when relevant) and frozen in 15% glycerol. For cultivation, the bacterial compositions were thawed, the glycerol was removed and the mix germinated in 0.5% BHIS/Oxgall for 1 hour at room temperature when they contained spore preparations. Compositions containing vegetative bacteria did not undergo germination. The germinant was then washed out and the cultures diluted to a final concentration of 5×10⁷ cfu/mL and plated as biological replicates in a synthetically derived, fecal culture medium 4 (FCM4), that supports growth of many anaerobic gut bacteria.

[0357] In experiments to evaluate the abilities to reduce VRE and CRE carriage and restore colonization resistance in the gut by the designed bacterial compositions, over 50 unique compositions were tested. The DEs tested and their strain composition are shown in FIG. 1 and the diversity of the DEs tested in FIGS. 2A, 2B and 2C. Briefly, mice were first conditioned with antibiotics to disrupt the native microbiome and impair colonization resistance. Mice were then challenged on Day 0 with either a vancomycin-resistant isolate of Enterococcus faecium (ATCC 700221) or a carbapenem-resistant isolate of Klebsiella pneumoniae to achieve high titer (up to 10¹⁰ CFU/g feces) carriage and intestinal domination by VRE or CRE, respectively. Daily treatment via oral gavage on Days 2, 3, and 4 with the DEs led to a greater than 2 log reduction in VRE or CRE titers in the feces relative to mice treated with vehicle, which maintained high VRE or CRE titers for up to several weeks (FIGS. 3A-3D). Further analysis of the log reduction in VRE or CRE titers by the DEs using the Spearman's correlation test indicated that the number of strains in a DE is not correlated with the VRE (r=0.028, p=0.84) or CRE (r=−0.025, p=0.90) decolonization as shown in FIGS. 3E and 3F, respectively. The Spearman's correlation test of the log reduction in VRE and that in CRE (r=0.14, p=0.49, as shown in FIG. 3G) suggests that the VRE and CRE titer reduction by a DE is not correlated, i.e., VRE and CRE decolonization in the animal models are driven by distinct factors.

[0358] Statistical models were used to assess the effects of adding/removing individual strains in the DEs and the effects of strain interactions (e.g. synergy, antagonism), which usually require a prohibitive number of combinatorial experiments. A single strain additive model was employed to assess the estimated additive effect of each strain on VRE/CRE decolonization, after accounting for the additive effects of other strains, as shown in FIGS. 4A-4F. A strain interaction model was adopted to analyze pairwise (synergistic and antagonistic) interactions between strains on VRE/CRE decolonization, accounting for differences in what would be expected based on single strain additive effects, as shown in FIGS. 5A-5D. Strains and strain combinations with significant effects were selected for candidate DEs.

[0359] In experiments where secondary bile acid production by bacterial communities was assayed, FCM4 was supplemented with conjugated primary bile acids (glycocholic acid, taurocholic acid, glycochenodeoxycholic acid and taurochenodeoxycholic acid) at a final concentration of 100 uM. Bacterial cultures were incubated anaerobically at 37° C. for 7 days, after which their biomass was measured by absorbance of 100 μL culture at 600 nm. The remaining culture was centrifuged at 4000 rpm, the supernatants passed through a 0.2 μm filter and used in biochemical and cell-based assays. HDAC inhibition assays, pro-inflammatory assay in IECs, anti-inflammatory assay in IECs, epithelial integrity assay, macrophage and t-cell activation and cytotoxicity assays, determination of SCFAs, MCFAs, and tryptophan metabolites were performed. For determination of bile acid metabolites, 100 μL, of bacterial cell-free supernatant was then extracted with an equal volume of acetonitrile and filtered through a 0.2 μm filter, generating samples for LC-MS analysis. Bile acids were separated using an Agilent 1260 HPLC equipped with a Microsolv bidentate C18 column preceded by a 0.2 μm pre-column filter. Separation was achieved using a water and acetonitrile gradient with 0.1% formic acid at a flow rate of 0.4 ml/minute. Samples were injected at a volume of 5 μL. The HPLC system was coupled to a Bruker Compass™ qTOF mass spectrometer calibrated to a mass range of 50 to 1700 m/z using the Agilent low-mass tuning mix. Each run was additionally calibrated to a reference mass solution injected at the beginning of each run. Bile acids were detected in negative mode and identified by unique m/z and retention times compared to known pure standards. Area under the peak was determined using Bruker data analysis software. Metabolites were quantified using calibration curves generated from pure standards, ranging in concentration from 0.001 μM to 100 μM.

### Engraftment Analysis

[0360] Table 1 shows engraftment analysis of bacterial species in a DE (DE122435.3) described herein. In particular, Table 1 identifies engraftment of such species when administered to a human subject suffering from ulcerative colitis (UC) and/or recurrent Clostridium difficile infection (rCDI) and associated efficacy.

TABLE 1
Observed Engraftment And Association with Efficacy of DE122435.3
species (or strains) in previous clinical trials

| | | | Strain | Species Associated |
|---|---|---|---|---|
| | Species Engraftment | | Engraftment | with Efficacy |
| STR | rCDI | UC | CDI | rCDI or UC |
| STR00010-STR00010.7 | x | x | n/a | x |
| STR00012-STR00012.6 | x | x | x | x |
| STR00022-STR00022.5 | | x | x | x |
| STR00025-STR00025.5 | | | n/a | |
| STR00075-STR00075.4 | x | x | x | x |
| STR00076-STR00076.6 | | x | x | |
| STR00081-STR00081.5 | | x | n/a | |
| STR00083-STR00083.5 | | x | x | |
| STR00092-STR00092.6 | | x | n/a | |
| STR00096-STR00096.6 | | | x | |
| STR00097-STR00097.4 | | x | n/a | |
| STR00105-STR00105.7 | x | x | n/a | x |
| STR00107-STR00107.5 | | x | n/a | |
| STR00132-STR00132.5 | | | n/a | |
| STR00139-STR00139.4 | | x | n/a | |
| STR00143-STR00143.6 | x | x | n/a | x |

[0361] In Table 1, engraftment of species matching strains in DE122435.3 in subjects receiving HHSPs are noted in the first two columns. A range of STRs is indicated in the first column to identify representative sequences for the strains in DE122435.3. For example, “STR00010-STR00010.7” refers to all of STR00010, STR00010.1, STR00010.2, STR00010.3, STR00010.4, STR00010.5, STR00010.6, and STR00010.7. The same notation is repeated for Tables 2 and 3 below. Engraftment of the strains in subjects in a Phase 1 b trial with a designed composition is noted in the third column (n/a indicates strain not present). In the final association with efficacy column, species associated with non-recurrence of CDI, reduction in Enterobacteriaceae, or remission from UC are noted.

### Carbon Source Utilization

[0362] Live biotherapeutic products provide or restore colonization resistance, in part, through direct competition for nutrients, such as carbon (Kamada, 2012). Targeting the carbon sources utilized by pathogenic species, e.g., Klebsiella pneumoniae and Enterococcus faecium, the ability of various strains to utilize 85 different carbon sources was determined in vitro.

[0363] Growth was scored by measuring optical density at 600 nm and comparing it to growth in base medium without a test carbon source. Growth was assessed under anaerobic conditions for all organisms. Of the 85 carbon sources tested, the 56 used by K. pneumoniae and/or E. faecium were presented.

[0364] All 56 carbon sources used by K. pneumoniae or E. faecium were used by at least one tested strain (Table 2, n.d.=data unavailable, and filled cells indicate utilization of the carbon source). Notably, some tested strains appear to be generalists like K. pneumoniae or E. faecium, using a variety of carbon sources; while some appear to be specialists, utilizing a limited number of carbon sources. This mix of carbon utilization profiles reflects the functional diversity amongst the tested strains and is consistent with a phylogenetically and functionally diverse composition, such as that disclosed herein (e.g., DE122435.3).

TABLE 2
Comparison of carbon source utilization profile of Klebsiella pneumoniae (CRE) and Enterococcus faecium (VRE) to DE122435.3
species. Cells with a “U” indicate utilization of the C-source, based on anaerobic growth detected by optical density
in medium with indicated C-source and cells with a “w” indicates ‘weak’ utilization. Empty cells indicate no
utilization of the C-source, and n.d. indicates no data. Of the 85 carbon sources tested, 56 used by either CRE or VRE are presented.

| | | | STR00010- | STR00012- | STR00022- | STR00025- | STR00075- | STR00076- | STR00081- | STR00083- |
|---|---|---|---|---|---|---|---|---|---|---|
| | CRE | VRE | STR00010.7 | STR00012.6 | STR00022.5 | STR00025.5 | STR00075.4 | STR00076.6 | STR00081.5 | STR00083.5 |
| apple pectin | w | | w | w | | U | U | w | U | |
| pectin | U | U | U | U | U | U | U | U | U | U |
| polygalacturonate | w | w | w | U | w | | U | w | | |
| FOS/inulin | U | U | U | | U | w | | U | U | U |
| Inulin | | w | U | | | | | | w | |
| pullulan | U | | | | | U | | | w | |
| starch | U | | w | | | U | w | | | |
| galactomannan | w | w | | | | | U | | | w |
| glycogen | U | | | | | U | U | | w | w |
| xanthan | w | | | | | | | | | |
| guar | | w | | U | | | U | | U | |
| cyclodextrin | | U | | | | U | | | w | |
| raffinose | U | | U | | U | | | U | U | U |
| cellobiose | U | U | U | U | | | | U | w | U |
| lactose | U | U | U | | | w | | U | U | U |
| maltose | U | U | U | U | U | U | | U | U | U |
| sucrose | U | U | U | | U | w | | U | U | U |
| trehalose | U | U | U | U | U | U | | U | | U |
| arabinose | U | U | U | U | U | U | | U | U | U |
| ribose | U | U | w | U | U | U | U | U | U | U |
| xylose | U | | U | U | U | | | U | U | U |
| fructose | U | U | U | U | U | U | U | U | U | U |
| fucose | U | | | | U | | | U | | U |
| galactose | U | U | U | U | U | | | U | U | U |
| glucose | U | U | U | U | U | U | w | U | U | U |
| mannose | U | U | U | U | U | | | U | U | U |
| rhamnose | U | | | | U | | | U | | w |
| sorbose | U | w | | U | | | U | w | | |
| glucuronate | U | U | n.d. | n.d. | n.d. | | n.d. | n.d. | | n.d. |
| NAG | U | U | | U | U | | | w | U | U |
| glucosamine | U | U | U | n.d. | n.d. | | n.d. | n.d. | U | n.d. |
| mucic acid | U | | | | | | U | | U | |
| glycerol | U | | | | U | | | U | | U |
| erythritol | U | | | | | U | | | | |
| dulcitol | U | | | U | | | | U | | U |
| inositol | w | | | | | | | U | | |
| mannitol | U | U | U | U | | | | U | | w |
| sorbitol | U | U | U | U | | | | U | | U |
| xylitol | w | | U | U | | | | U | U | |
| salicin | U | U | U | U | | | | U | | U |
| esculin | U | U | U | U | | w | | U | U | U |
| arbutin | U | U | U | U | | | | U | | U |
| arginine | w | | | | | | | | | |
| histidine | w | | | | | | | U | | |
| serine | U | | | U | w | | U | U | U | w |
| asparagine | U | | | | | | | w | | |
| aspartic acid | w | | | | | | | | w | |
| tryptophan | U | w | n.d. | w | | | U | | U | |
| succinate | w | | | | | | U | | | |
| pyruvate | U | | | U | w | | U | U | w | U |
| citrate | U | | | | | | | | | |
| fumarate | w | | | | | | | | w | |
| malate | U | | | | | | | w | w | |
| lactate | w | | | | | U | | w | w | |
| ethanolamine | U | | | | | | U | | | |
| mucin | U | w | | | | | U | | | |

| | STR00092- | STR00096- | STR00097- | STR00105- | STR00107- | STR00132- | STR00139- | STR00143- |
|---|---|---|---|---|---|---|---|---|
| | STR00092.6 | STR00096.6 | STR00097.4 | STR00105.7 | STR00107.5 | STR00132.5 | STR00139.4 | STR00143.6 |
| apple pectin | | | | U | | | | w |
| pectin | U | U | w | w | U | | U | U |
| polygalacturonate | w | U | | | | | | w |
| FOS/inulin | w | U | | U | w | U | | U |
| Inulin | | w | w | U | | U | | U |
| pullulan | | U | | | | | | |
| starch | U | w | U | U | U | | | U |
| galactomannan | U | | w | | w | w | | w |
| glycogen | U | w | | | U | | | U |
| xanthan | | w | | | | | | |
| guar | | | U | | | | | |
| cyclodextrin | w | | U | w | w | | | w |
| raffinose | U | U | | U | U | U | | U |
| cellobiose | U | U | | U | | U | | U |
| lactose | U | U | | U | U | U | | U |
| maltose | U | U | U | U | U | U | w | U |
| sucrose | U | U | | U | U | U | U | U |
| trehalose | U | U | | | U | U | | |
| arabinose | | U | U | U | U | U | U | U |
| ribose | w | U | w | w | U | U | U | U |
| xylose | | U | w | | U | U | | U |
| fructose | U | U | | U | U | U | U | U |
| fucose | | U | U | | U | U | U | U |
| galactose | U | U | U | U | U | U | w | U |
| glucose | U | U | U | U | U | U | w | U |
| mannose | U | | U | | U | U | U | U |
| rhamnose | w | U | | | | U | | U |
| sorbose | | | | | | | | U |
| glucuronate | | n.d. | | | U | | | |
| NAG | U | U | U | U | U | U | U | |
| glucosamine | U | n.d. | w | n.d. | U | | U | U |
| mucic acid | w | w | U | w | w | | | |
| glycerol | | w | | U | U | n.d. | U | U |
| erythritol | | | | | | | | |
| dulcitol | | w | U | U | | | | |
| inositol | | U | w | | | | | |
| mannitol | | U | | U | | | U | |
| sorbitol | | U | U | U | U | | w | U |
| xylitol | | U | U | w | | | | U |
| salicin | U | U | w | U | | U | | |
| esculin | U | U | U | n.d. | w | U | U | |
| arbutin | U | U | U | n.d. | | U | | |
| arginine | | | U | | | | | |
| histidine | | | | | | | | |
| serine | | w | U | U | | | | |
| asparagine | | w | | | | | U | |
| aspartic acid | | w | U | | | | U | |
| tryptophan | w | | U | n.d. | w | n.d. | | |
| succinate | | | | | | | | |
| pyruvate | | U | | | w | | U | w |
| citrate | | | | | | | w | |
| fumarate | | | | | | | U | |
| malate | | | | | | | U | |
| lactate | | | | | | | U | |
| ethanolamine | | | U | | | | | |
| mucin | w | | | | | w | | |

### Metabolite Production

[0365] Several bacterial metabolites were reported to be dysregulated in the microbiome of subjects with GI barrier disruption and GvHD. As described herein, non-limiting examples of such metabolites include short-chain and medium-chain fatty acids (SCFAs and MCFAs, respectively), tryptophan-derived metabolites, bile acid metabolites, e.g., produced by bacteria with 7-α-dehydroxylation activity, and combinations thereof. Therefore, various strains were evaluated for their ability to produce key SCFAs, tryptophan metabolites, and 7-α-dehydroxylated bile acids in vitro.

[0366] Individual strains were grown in vitro and culture supernatants were filtered and analyzed by gas chromatography mass spectrometry for the presence of SCFAs, medium chain fatty acids (MCFAs), and tryptophan metabolites. As shown in Table 3, of the strains present in DE122435.3, nine produced propionate and seven produced butyrate, i.e., two SCFAs with known anti-inflammatory properties. In addition, several of the strains were also able to produce the MCFAs valerate and hexanoate. Several strains produced tryptophan-derived metabolites. Three strains produced significant levels of indole and another three strains produced indole-3-pyruvic acid and/or indole-3-acetic acid, all of which are known to exert anti-inflammatory effects in the gut (Aoki, 2018; Bansal, 2010; Ji, 2020). In Table 3, cells marked with “P” indicates strains that produced the metabolite where marked, empty cells indicate no metabolite production, and cells marked “ND” indicate not determined.

TABLE 3
In vitro Characterization of DE122435.3 species

| | Cell & biochemical | | | Metabolites evaluated by Mass Spectrometry | | | | | | |
|---|---|---|---|---|---|---|---|---|---|---|
| | based assays | | | | | | | | Indole Ac/ | LCA/DCA |
| | | Anti- | Pro- | | | | | | Indole | (7aD |
| Strain | HDACi | inflam. | inflam. | Propionate | Butyrate | Valerate | Hexanoate | Indole | Pyr¹ | activity)² |
| STR00010- | P | P | | P | | | | | | |
| STR00010.7 | | | | | | | | | | |
| STR00012- | P | P | | | P | P | P | | | |
| STR00012.6 | | | | | | | | | | |
| STR00022- | P | | | P | | | | | | |
| STR00022.5 | | | | | | | | | | |
| STR00025- | P | P | | P | P | P | P | | P | |
| STR00025.5 | | | | | | | | | | |
| STR00075- | P | P | | P | P | | P | P | | |
| STR00075.4 | | | | | | | | | | |
| STR00076- | | | | | | | | | | |
| STR00076.6 | | | | | | | | | | |
| STR00081- | P | P | | | P | P | P | P | | |
| STR00081.5 | | | | | | | | | | |
| STR00083- | P | | | P | | | | ND | ND | |
| STR00083.5 | | | | | | | | | | |
| STR00092- | | | | P | P | | | | P | |
| STR00092.6 | | | | | | | | | | |
| STR00096- | P | | | P | | | | ND | ND | |
| STR00096.6 | | | | | | | | | | |
| STR00097- | P | P | | | P | | | | | |
| STR00097.4 | | | | | | | | | | |
| STR00105- | | | | | | | | | P | |
| STR00105.7 | | | | | | | | | | |
| STR00107- | | | | | | | | P | | |
| STR00107.5 | | | | | | | | | | |
| STR00132- | P | P | | P | P | P | P | | | |
| STR00132.5 | | | | | | | | | | |
| STR00139- | | | | | | | | | | P |
| STR00139.4 | | | | | | | | | | |
| STR00143- | P | | | P | | | | | | |
| STR00143.6 | | | | | | | | | | |

¹Indole-3-pyruvic acid and/or indole-3-acetic acid
²Lithocholic acid/deoxycholic acid (7-α-dehydroxylation activity)
Inhibition of HDAC Activity

[0367] Inhibition of HDAC activity in IECs and immune cells is one of the main mechanisms by which bacterial metabolites such as SCFAs suppress inflammatory pathways and enhance anti-inflammatory responses in epithelial and immune cells (Kim, 2018). Therefore, to assess the HDAC inhibition activity of the bacterial strains disclosed herein, a commercially available in vitro chemiluminescent assay was used. supernatants were tested in the HDAC inhibition assay (HDAC-Glo I/II assay kit, Promega #G6422) with HeLa nuclear extract (Promega #G6570) as the source of HDAC enzymes. The HDACi assay was performed with 15 μL bacterial supernatant, 10 μL 1M Tris pH 8, and 75 μL of assay buffer containing HeLa nuclear extract. To promote metabolite binding to HDACs, the HDAC solution was preincubated with the bacterial supernatants for 15 minutes prior to the addition of the developing reagent containing proteases that can cleave the deacetylated peptide from the luminogenic substrate. Release of the luminogenic substrate into solution was quantified by measuring luminescence after 20 minutes. As shown in Table 3 (above), 11 of the species present in DE122435.3 exhibited HDAC inhibition activity as measured in vitro.

### Anti-Inflammatory Activity in Intestinal Epithelial Cells (IECs)

[0368] IL-8 level is generally elevated in the inflamed intestinal mucosa of UC patients. Accordingly, the ability to suppress IL-8 induction in intestinal epithelial cells is a relevant readout for identifying bacterial species that can modulate as inflammatory immune response, such as that observed in many infections and GvHD.

[0369] Briefly, to assess the anti-inflammatory activity of the bacterial strains disclosed herein, HT29 cells (an epithelial cell line derived from a colorectal carcinoma), cultured in McCoys Medium supplemented with 10% FBS, GlutaMAX and Pen/Strep were plated at a density of 50k cells/well in 96-well format and allowed to grow for 5 days until fully confluent. Culture medium was changed every two days. On day 5, cells were pre-treated for 1 hour with a bacterial metabolite (e.g., butyrate, propionate, or acetate) or with bacterial supernatants (10% in cell culture medium) before exposure to 1.25 ng/ml recombinant human TNF-α (Peprotech). Cells were incubated for 4 hours. Culture supernatants were collected and assayed for human IL-8 protein by ELISA (R&D systems) or AlphaLISA (Perkin Elmer). IL-8 levels of test samples were normalized to inflammatory controls that were 10% blank bacterial culture medium pre-treated samples that were exposed to the 1.25 ng/ml TNF-α. To measure the pro-inflammatory capacity of individual bacterial strains, human IL-8 concentrations were measured in cell culture supernatants treated with 10% bacterial supernatant in the absence of TNF-α stimulation.

[0370] The anti-inflammatory activity of the individual bacterial strains present in the DE122435.3 composition is shown in Table 3 (above). Seven of the strains reduced IL-8 secretion in TNF-α stimulated HT29 cells by at least 50%, indicative of anti-inflammatory activity.

[0371] Collectively, the above results demonstrate that the bacterial strains disclosed herein, such as those present in the DE122435.3 composition, exhibit one or more properties that could be useful in treating and/or reducing the risk of an infection or GvHD in a HSCT subject.

[0372] FIGS. 1 and 2A identify the bacterial species included in the different designed compositions. Depending on their bacterial species make-up, the designed bacterial compositions exhibited varying functional activity—see, e.g., FIG. 8B (restoration of epithelial integrity); FIGS. 9A and 9B (anti-inflammatory activity); FIG. 10 (inhibition of HDAC activity); FIGS. 11A-11E (short-chain and medium-chain fatty acid production); FIG. 12 and Table 4 (secondary bile acid production); FIGS. 13, 14A-14P, 15A, 15B, 16A, 16B, and 17 (regulation of genes associated with inflammatory response); and FIGS. 18A, 18B, 19A-J, 20A, and 20B (modulate macrophage phenotype).

### Example 2: In Vivo Analysis of the Effect of DE122435.3 Composition on VRE Colonization

[0373] To assess the therapeutic effects of bacterial compositions comprising one or more of the bacterial strains disclosed herein, a mouse model of VRE colonization was used. Briefly, mice were first conditioned with ampicillin in drinking water for eight days to disrupt the native microbiome and impair colonization resistance (see FIG. 6A). On the seventh day of ampicillin treatment (i.e., day 0), the animals were challenged with 1.0×10⁸ colony-forming units (CFU) of Enterococcus faecium (ATCC 700221) by oral gavage. Two days later, ampicillin was removed, and the animals received a dose of either a vehicle control or the DE122435.3 composition daily for three days via oral gavage (i.e., days 2, 3, and 4 post VRE challenge). At various times post VRE challenge, VRE burden (i.e., titer) was quantified in fecal pellets by plating on selective media.

[0374] As shown in FIG. 6B, compared to the control animals, mice that received three daily administrations of the DE122435.3 composition had significantly reduced VRE burden. From about day 11 post VRE challenge (i.e., 7 days after the last DE122435.3 administration), animals treated with the DE122435.3 composition had about 2-fold or greater log reduction in VRE titer (see FIG. 6C).

[0375] The above result demonstrates that the combination of bacterial strains selected to design the DE122435.3 composition is useful in reducing VRE and thereby, promoting colonization resistance in the gastrointestinal tract.

### Example 3: In Vivo Analysis of the Effect of DE122435.3 Composition on CRE Colonization

[0376] The therapeutic effect of the DE122435.3 composition on CRE colonization was also assessed in a mouse model. As shown in FIG. 7A, mice were conditioned with an antibiotic cocktail containing ampicillin, vancomycin, clindamycin, and metronidazole (“AVCM”) by oral gavage for five days. On the fourth day of AVCM treatment (i.e., day 0), mice were challenged with 1.0×10⁶ CFU of CRE by oral gavage. Two days later, AVCM treatment was stopped. And, starting at day 4 post CRE challenge, the animals received a dose of either the vehicle control or the DE122435.3 composition daily for six days via oral gavage (i.e., days 4-9 post CRE challenge). CRE burden was quantified in fecal pellets by plating on selective media at various time points.

[0377] As observed in the VRE animal model, mice that were treated with the DE122435.3 composition had significantly reduced CRE burden compared to the control animals (see FIGS. 7B and 7C). The difference in CRE burden between the two groups began to be apparent after just 3-4 administrations of the DE122435.3 composition.

[0378] The above result demonstrates that the combination of bacterial strains present in the DE122435.3 composition is useful in reducing the burden of certain antibiotic resistance pathogens, and thereby, promoting colonization resistance in the gastrointestinal tract.

### Example 4: Assessment of SCFA Production by HDAC Inhibition Assay and Assessment of Bile Acid Production

[0379] Short-chain fatty acids (SCFAs) have been described as playing a role in regulating host immunity. Studies have described altered patterns of SCFA in patients of different gastrointestinal diseases, e.g., colitis, and administration of butyrate and propionate have been reported to have therapeutic effects in a colitis animal model. Both in vitro and in vivo, SCFAs have been shown to inhibit histone deacetylate (HDAC) activity, which can then, in turn, regulate many aspects of an immune response (e.g., induction of FoxP3⁺ regulatory T cells). Therefore, bacteria that can produce SCFAs can be useful for the treatment of IBD (e.g., UC) patients.

[0380] All bacterial composition frozen stocks were diluted to a final concentration of 5×10⁶ CFU/mL and inoculated as biological replicates in a synthetically derived fecal culture medium 4 (FCM4). FCM4 is composed of complex carbohydrates and mucin in addition to other nutrients that support growth of numerous phylogenetically diverse anaerobic species found in the colon. The medium was supplemented with conjugated bile acids (gCA, tCA, gCDCA and tCDCA) at a final concentration of 100 μM to allow for analysis of microbial bile acid metabolism. Cultures were grown in 96-well deep well plates for a final sample volume of 1.2 mL/well and sealed with adhesive Aeraseal films to allow gas exchange. Bacterial cultures were incubated anaerobically at 37° C. for 7 days, after which cultures were centrifuged at 4000 rpm for 20 minutes, the supernatants passed through a 0.2 μm GHP membrane filter (Pall Corporation, cat #5052).

[0381] Microbial supernatants were used for the HDAC inhibition assay (HDAC-Glo I/II assay kit, Promega) and HeLa nuclear extract (Promega) as the source of HDAC enzymes. Assays were performed with 15 μL supernatant, 10 μL 1M Tris pH 8, 75 μL of assay buffer containing diluted HeLa nuclear extract which were preincubated for 15 minutes prior to the addition of developing reagent. Luminescence was measured after 20 minutes. Under these conditions, a sterile supernatant spiked with 15 mM butyrate resulted in 65-75% HDAC inhibition.

[0382] As shown in FIG. 10, a number of bacterial compositions were tested for the ability to inhibit HDAC activity. Metabolites produced by three bacterial compositions disclosed herein, DE122435.3, DE122435.1, DE122435.4, strongly inhibit HDAC activity in vitro (>85% HDAC inhibition compared to the no addition control). All three bacterial compositions showed comparable HDAC inhibition to the complex spore pilot lot demonstrating that a rationally designed consortium can exhibit metabolic phenotypes of interest at the levels of a natural complex community. The negative control DE821956.1 in contrast is less potent in inhibiting HDAC activity. Under these conditions (10 mM butyrate), a bacterial metabolite with strong HDAC inhibitory activity, resulted in 91% inhibition.

[0383] FIGS. 11A-11E compare SCFA production. FIG. 12 and Table 4 provide a comparison of several properties of the bacterial compositions disclosed herein, including bile acid metabolic activity (i) BSH tCA [for bile salt hydrolase activity on taurocholic acid], (ii) BSH gCA [for bile salt hydrolase activity on glycocholic acid], (iii) BSH CA [for bile salt hydrolase activity on cholic acid], and (iv) 7aD DCA [for 7α-dehydroxylase activity on DCA]. Bile acid activity was measured in in vitro cultures of the different bacterial compositions shown fed the conjugated primary precursors. The primary bile acid products shown include (i) cholic acid (CA) (i.e., BSH byproduct), and (ii) chenodeoxycholic acid (CDCA) (i.e., BSH byproduct). The secondary bile acid products shown include (i) deoxycholic acid (i.e., 7aD byproduct), (ii) lithocholic acid (LCA) (i.e., 7aD byproduct), (iii) oxo-derivatives of CA and CDCA (i.e. HSDH byproducts), and (iv) urso-deoxycholic acid (UDCA, an HSDH byproduct).

TABLE 4
Bile acid metabolite activity shown as amount of primary and secondary bile acid products.

| Bile Acid Information | | Sample | | | |
|---|---|---|---|---|---|
| Metabolite Type | Bile Acid | Media | DE122435.3 | PNP 167020 | DE821956.1 |
| Conjugated | gCA | 432 ± 87.3 | n.d. | n.d. | n.d. |
| primary | tCA | 319.7 ± 65.5 | n.d. | n.d. | n.d. |
| precursors | gCDCA | 1909.8 ± 1986.7 | 0.8 ± 3.5 | n.d. | n.d. |
| | tCDCA | 370.9 ± 57.6 | n.d. | n.d. | n.d. |
| Primary bile | CA | 8.2 ± 5 | 1241.4 ± 558.5 | 43.3 ± 32.1 | >100 |
| acid products | CDCA | n.d. | 120.1 ± 16.8 | 3.2 ± 4.7 | >100 |
| Secondary | DCA | n.d. | 167.2 ± 21.2 | 606.8 ± 412.1 | n.d. |
| bile acid | LCA | n.d. | 3.5 ± 1.4 | 0.5 ± 0.1 | n.d. |
| products | 3-oxo LCA | n.d. | n.d. | n.d. | n.d. |
| | 7-oxo 3a | n.d. | 72.6 ± 4.8 | 18.9 ± 20.2 | 197.7 ± 28.2 |
| | 12-oxo 3a | n.d. | 14.3 ± 2.5 | 33 ± 8.2 | n.d. |
| | 3-oxo 7a | n.d. | 6.4 ± 0.8 | 20.4 ± 8.4 | 20 ± 16.5 |
| | 7-oxo 3a 12a | n.d. | 83 ± 5 | 82.9 ± 49.7 | 83.5 ± 12.7 |
| | 12-oxo 3a 7a | n.d. | 2.5 ± 0.3 | 3.3 ± 2.8 | 7.3 ± 3.3 |
| | 3b 12a (iso-DCA) | n.d. | 61.6 ± 4.3 | 50.9 ± 20.4 | 72.1 ± 12.8 |
| | UDCA | n.d. | 2.6 ± 0.7 | 46 ± 35.1 | 0.7 ± 1.8 |

[0384] The above data indicate that the designed bacterial compositions disclosed herein exhibit certain functional attributes (e.g., HDAC inhibition, production of short-chain and medium-chain fatty acids, and bile acid metabolic activity), which can be useful in treating diseases or disorders, such as an infection or GvHD following HSCT.

### Example 5: Barrier Integrity Analysis

[0385] As described herein, many of the bacterial strains provided in the present disclosure are capable of producing certain tryptophan metabolites and short chain fatty acids, which are associated with more robust intestinal epithelial barrier and mucosal homeostasis. Disruption of normal barrier function (e.g., due to destruction of tight junctions between epithelial cells and apoptosis induced by chronic inflammation) is an important factor in the pathogenesis of certain diseases or disorders, such as GvHD. Therefore, the ability of bacterial compositions comprising one or more of the bacterial strains disclosed herein to restore barrier integrity was assessed with an in vitro epithelial barrier assay.

[0386] As illustrated in FIG. 8A, the assay apparatus has an apical side and a basal side that are separated by a monolayer of epithelial cells on a permeable membrane. The addition of interferon-gamma (IFN-γ) disrupts the tight junctions of the epithelial monolayer and induces apoptosis of epithelial cells (see bottom well). The leakiness of the membrane can be assessed by adding FITC-dextran to the apical side of the apparatus and measuring how rapidly it can pass to the basolateral compartment. A leaky monolayer will allow FITC-dextran to the basal side of the apparatus more quickly than a monolayer with an intact monolayer.

[0387] Briefly, the barrier integrity assay was conducted as described below using the DE122435.3 composition. Primary human colon organoid cultures established from isolated colon crypts were grown and expanded in Matrigel® (Corning) and 50% L-cell conditioned medium containing Wnt3a, R-spondin 3 and Noggin (L-WRN) as described by VanDussen et al. containing 10 uM Y-27632 and 10 uM SB43152 (Gut 64:911-920, 2015). Colon organoids were harvested and trypsinized into a suspension containing few cell clusters and seeded onto Matrigel coated transwell inserts (Corning) at a density of 100,000 cells per insert in 50% L-WRN medium supplemented with 10 μM Y-27632 (Millipore Sigma). Epithelial cell monolayers formed over 4-5 days in 50% L-WRN medium. These primarily stem cell population was differentiated into colonocytes by switching the culture medium to 5% L-WRN for 48 hours. After 24 hours of differentiation, a test agent (e.g., bacterial supernatant) was added to apical interface in 100 μL of 5% L-WRN medium and 5-25 ng/ml INFγ (Peprotech), depending on the experiment, was added in 175 μL of 5% L-WRN medium to the basolateral interface and incubated for 48 hours at 37° C. After the 48 hour incubation, colonic epithelial monolayer permeability was assessed by adding 10 μL of 10 ng/ml FITC-Dextran (4 kDa, Sigma) to the apical interface, the organoids were incubated for 1 hour and then 100 μL of medium was collected from the basolateral compartment of each transwell and transferred to a 96 well plate for fluorescence detection.

[0388] As shown in FIG. 8B, application of supernatant from DE122435.3 to the apical surface prevented IFN-γ-mediated barrier disruption, as seen by the reduced fluorescence in the basal compartment compared to the IFN-γ control as did three healthy donor spore pilot lots. In contrast, supernatants of a pro-inflammatory composition, DE831956.1 were not protective. These data show that the bacterial composition DE122435.3 led to a significant reduction in barrier permeability.

### Example 6: Anti-Inflammatory Activity with Intestinal Epithelial Cells

[0389] Using the methods provided in Example 1 for measuring anti-inflammatory activity of individual bacterial strains disclosed herein, the anti-inflammatory activity of DE122435.3, DE122435.1, and DE122435.4 were evaluated. A consortium of bacterial spores from a healthy human donor (a nonclinical pilot lot 20, hereafter ‘Pilot lot 20’) and a composition with inflammatory properties (DE821956.1) were also included as positive and negative controls, respectively. All bacterial cultures were grown in vitro in complex medium that supports the growth of many anaerobic gut bacteria, mimicking the nutrients found in the colon. Supernatants from these cultures were filtered and applied to HT29 cells which were then treated with TNF-α to induce IL-8 secretion.

[0390] As shown in FIG. 9A, DE122435.3, DE122435.1, DE122435.4 and Pilot lot 20 supernatants significantly reduced IL-8 secretion in TNF-α stimulated HT29 cells compared to the TNF-α alone control group. Negative Control DE821956.1 increased IL-8 secretion compared to TNF-α alone, confirming its inflammatory nature.

[0391] The above supernatants were also tested in the same IEC assay without TNF-α treatment to assess the ability of the different bacterial compositions to induce IL-8, indicative of proinflammatory activity. As shown in FIG. 9B, DE122435.3, DE122435.1 and DE122435.4 supernatants did not elicit significant IL-8 secretion in the HT29 cells. By contrast, with the Pilot lot 20 composition, more IL-8 secretion was observed than with DE122435.3, DE122435.1 and DE122435.4, demonstrating advantages to the designed compositions compared to a healthy donor-derived spore-based composition. On the other hand, DE821956.1 induced IL-8, as expected, given the pro-inflammatory activity of its strains.

[0392] The above results demonstrate the anti-inflammatory nature of the bacterial compositions disclosed herein, suggesting their suitability in treating and/or reducing the risk of diseases or disorders, such as infections and GvHD in HSCT subjects.

### Example 7: Regulation of Cellular Pathways Relevant to Inflammation and GvHD

[0393] Bacterial composition-mediated regulation of gene expression pathways relevant to inflammation and GvHD was profiled in human primary epithelial organoids. Primary intestinal epithelial organoids, or “mini-guts” are complex, self-organizing, cell structures formed by Lgr5⁺ adult intestinal stem cells that consist of goblet cells, paneth cells, enteroendocrine cells (Sato et al, Gastroenterology Journal, 141:1762-1772, 2011). Primary human colon organoid cultures established from isolated colon crypts were grown and expanded in Matrigel® (Corning) and 50% L-cell conditioned medium containing Wnt3a, R-spondin 3 and Noggin (L-WRN) as described by VanDussen et al. (Gut 64:911-920, 2015). Colon organoids were grown in 24-well plates for 5 days in 50% L-WRN medium. After 5 days of mini-gut structure formation in 50% L-WRN medium, organoid culture medium was switched to 5% L-WRN medium to induce differentiation of the organoids. After 24 hours in 5% L-WRN medium, organoids were treated with 10% DE supernatants in fresh 5% L-WRN medium supplemented with the inflammatory cytokine, e.g., 12.5 ng/ml human TNFa (Peperotech) or 10 ng/ml IFN- [symbol] . Control conditions include organoids treated with 5% L-WRN+10% bacterial culture medium and 5% L-WRN+10% bacterial culture medium+12.ng/ml human TNFa or IFN- [symbol] . Organoids were incubated in treatment conditions overnight and then collected in Qiagen RLT buffer for RNA analysis. Sample lysates were either purified into RNA using Qiagen RNeasy mini prep kit or lysates were assayed directly on the Nanostring nCounter platform. In some aspects, purified RNA was used to prepare amplified cDNA libraries that were sequenced using an Illumina NovaSeq 6000 instrument. As shown in FIG. 13, organoids were grown from passage in 50% LWRN for 5 days to form robust mini-guts. Following that, medium was switched to 5% LWRN to produce a more differentiated epithelium for 24 hours. DE supernatants were added to the differentiated epithelium and co-treated with/without IFN-γ overnight in 5% L-WRN. Organoids were then harvested for transcript profiling.

[0394] As shown in FIGS. 14A-14P, DE122435.3 and the pilot lots prevented IFN-γ-mediated induction of inflammatory pathways. Co-treatment of colonic organoids with 5% bacterial supernatant in the presence of 10 ng/ml IFNγ decreased expression of many pathways related to inflammation including (1) NF-κB signaling (FIG. 14A), (2) TNF family signaling (FIG. 14B), (3) inflammasomes (FIG. 14C), (4) oxidative stress (FIG. 14D), (5) apoptosis (FIG. 14E), (6) Th2 differentiation (FIG. 14F), (7) Th17 mediated biology (FIG. 14G), (8) complement system (FIG. 14H), (9) type I interferon signaling (FIG. 14I), (10) type II interferon signaling (FIG. 14J), (11) lymphocyte trafficking (FIG. 14K), (12) Toll Like Receptor signaling (FIG. 14L), (13) NLR signaling (FIG. 14M), (14) mTOR (FIG. 14N), (15) MHC Class I antigen presentation (FIG. 14O), and (16) MHC Class II antigen presentation (FIG. 14P). Of particular relevance for GvHD, are pathways related to leukocyte trafficking and T cell activation, as the disease is caused by abnormal T cell activation. Moreover, inhibition of epithelial apoptosis and oxidative stress pathways can play a significant role in enhancing epithelial barrier repair after transplant pre-conditioning.

[0395] Chemokines are inducers of leukocyte trafficking and activation, which lead to tissue damage during GvHD. Chemokines are a family of small proteins (about 8-14 kDa) that are classified into four major groups based on the number and spacing of conserved cysteines; the groups include the CC group (CCL1-28), the CXC group (CXCL1-16), the C group (XCL1-2), and the CX3C group (CX3CL1). (Castor et al., Front Pharmacol.3:23 (2012), PMCID: PMC3285883). Particularly, CXCL9 and CXCL10 are involved in T-cell recruitment and increased CXCL10 is seen in both acute and chronic GvHD patient sera. IL-1β neutralization improves survival of mice subject to a GvHD model of irradiation. CX3CL1 is also involved in T-cell recruitment and increased CX3CL1 is observed in GI and mononuclear lamina propria cells of GvHD patients. CCL2 is important for migration of donor cells to target organs during GvHD development and elevated CCL2 associated with migration of donor cells to lungs. Increased CXCL1 and CXCL2 levels are observed in GI tract of mice receiving allogeneic bone marrow transplant.

[0396] The interaction between chemokines and one or more members of a family of seven transmembrane domain-containing G-protein-coupled receptors exerts the effects on the pathogenesis of GvHD. In GvHD, downstream signaling of chemokine receptors leads to activation of PI3K, JAK, STAT, and MAPK and thus pro-inflammatory events that are crucial to GvHD development. STAT-3/STAT-1 activation precedes the activation of NF-κB and MAP kinases with the subsequent expression of IRF-1, SOCS-1, and IL-17. NF-κB has a dual role in GVHD development, depending on phase of its expression. STAT-3 phosphorylation acts as a promoter of GVHD inflammation and is regulated by SOCS-3. (Front Pharmacol.3:23, PMCID: PMC3285883). STAT3 phosphorylation is important for allo-T-cell activation in GvHD. Inhibition of STAT3 phosphorylation prevents T-cell activation and proliferation in vitro and GvHD in vivo. (Blood, 112(13): 5254-5258.) Furthermore, a recent study found MHC class II-mediated antigen presentation by epithelial cells initiated GvHD. TLR adaptors MyD88 and TRIF signaling are required for MHC II expression. IFN-γ secreted by IELs (intra-epithelial lymphocytes) increases MHCII expression.

[0397] As shown in FIG. 15, IFN-γ induces expression of various chemokines and interleukins, including CXCL1-3, CXCL5, CXCL6, CXCL8-10, IL7, IL15, ILIA, IL1B, among other. Also shown in FIG. 15, inflammatory cytokine expression is downregulated by DE122435.3. As shown in FIG. 16A, chemokines CXCL1, CXCL2, CXCL5, CXCL8 were drastically downregulated by DE122435.3 and pilot lots. As shown in both FIGS. 16A-B, DE122435.3 downregulated inflammatory cytokines and chemokines similar to or slightly better than pilot lots 20/21. Negative control, DE821956.1, was less efficient in inhibiting inflammatory cytokines. And, as shown in FIG. 17, DE122435.3 upregulated TGF-β, a cytokine involved in mucosal healing and with anti-inflammatory properties.

[0398] The above results further highlight the anti-inflammatory and epithelial protective nature of the designed bacterial compositions disclosed herein, which can be useful in treating a disease or disorder associated with excessive inflammation, such as that observed in many infections and GvHD after HSCT.

### Example 8: In Vitro Cytokine Induction Profile in Macrophages

[0399] To further assess the ability of the designed bacterial compositions disclosed herein to treat a disease or disorder disclosed herein (e.g., GvHD), the ability of the bacterial compositions to modulate macrophage phenotype was assessed. Without committing to any one specific theory, antigen presenting cells, including macrophages, can play a role in activation of T cells, e.g., by producing inflammatory cytokines and/or presenting cognate antigens to the T cells. When such T cells are from an allogenic donor and recognize an antigen in the recipient, the activated T cells can attack the recipient tissues and thereby promote GvHD. Antigen presenting cells (e.g., macrophages) are also key sources of IL-23, a mediator of colonic GvHD. However, study reports have also suggested that certain macrophages exhibit anti-inflammatory properties (e.g., “M2”) and can repress T cell proliferation and activation.

[0400] Briefly, to test the above, human monocytic THP-1 cells were differentiated into macrophages with a chemical stimulant as follows. Human macrophages were derived from the THP-1 monocytic cell line (ATCC). THP-1 monocytes were grown in RPMI (Gibco) supplemented with 10% FBS, Pen/Strep, and sodium pyruvate. Cells were differentiated into macrophages by incubation with 25 ug/mL phorbol 12-myristate-13-acetate (PMA, Peprotech) for 24 hours. Cells were grown in 96 well tissue culture treated sterile microtiter plates (Corning) with 100,000 cells seeded per well. Macrophage differentiation is confirmed by quantifying attachment to the tissue culture growth plate (cellular adhesion assay) and expression of macrophage cell surface markers (determined by flow cytometry). The differentiation medium is then replaced with fresh medium, and cells are rested for 24 hours to return the cells to a basal signaling state. Following rest, differentiated macrophages are stimulated with 1% bacterial culture supernatant, a multiplicity of infection (MOI) of 20 bacterial cells (counted via flow cytometry) per macrophage, or a combination of 1% supernatant and MOI20 bacterial cells. After 24 hours of stimulation, culture supernatants were collected for cytokine measurements (Luminex). The cells were harvested for determination of viability or were used to generate cellular lysates for transcriptional analyses. Cell viability was measured via luminescence in an assay that directly measures the presence of cellular ATP (a marker of cell health; CellTiterGlo 2.0, Promega). Assay performance of CellTiterGlo was controlled via an ATP standard curve, and cellular viability was normalized to the respective medium alone (non-stimulated) wells. Quantitation of cytokine production was performed with a ThermoFisher multi-plexed Luminex panel with commercial standards. All analyte standard curves were quality controlled in xPONENT (custom Luminex software), and cytokines were detected above the limit of quantitation of each respective analyte. Transcriptional changes were assessed via NanoString Technologies multiplexed molecular barcode (human myeloid 2.0 panel) with analogous hybridization and sample prep conditions across cellular treatments. Raw probe counts were normalized using nSolver (NanoString Technologies software) with analogous background correction and data normalization across samples. The internal negative and positive controls (commercially provided by NanoString Technologies in each panel) all passed quality control across the samples. Data were plotted and analyzed for statistical significance in GraphPad Prism 8.4.3. As shown in FIG. 18A, differentiated macrophages stimulated with DE122435.3 maintain viability whereas macrophages stimulated with healthy complex natural communities or DE821956.1 exhibit about 40% decrease in viability. Transcriptional profiling of stimulated macrophages shows that DE122435.3 elicits significantly less pro-inflammatory gene expression changes, including Th1 and lymphocyte activation, antigen presentation, cyto- and chemo-kine and interleukin signaling, cell cycle and apoptosis, or TLR signaling than healthy complex communities (PNP167020; PNP167021; and PNP167022) or the negative control inflammatory DE821956.1 (FIGS. 19A-I).

[0401] As shown in FIG. 19J, DE122435.3 composition does not elicit the production of pro-inflammatory cytokines known to activate T cells, NK cells, or monocytes or to elicit the production of cytokines shown to be elevated in GvHD patients compared to complex natural communities. These data further demonstrate that, compared to natural communities or an inflammatory composition, the designed bacterial compositions disclosed herein exhibit significantly reduced pro-inflammatory properties that may potentially lead to exacerbation of GvHD.

[0402] As shown in FIGS. 20A and 20B, macrophages stimulated with DE122435.3 transcriptionally induce key innate immune defenses, including the complement pathway and calprotectin, an antimicrobial chelation complex pathway, critical for pathogen or commensal clearance in the event of barrier breach, at comparable levels of complex healthy bacterial communities. These data demonstrate that designed composition DE122435.3 elicits significantly reduced pro-inflammatory cytokine or transcriptional changes in human macrophages while also maintaining key functionality for innate defense and thus is an improvement over natural communities (i.e., spore-prep compositions).

### Example 9: Therapeutic Effect of the DE122435.1 and DE122435.3 Compositions in a Germ-Free Mouse Model of Immunomodulation

[0403] DE122435.1 is another bacterial composition that is related to the DE122435.3 composition described herein. DE122435.1 differs from the DE122435.3 composition by two strains. DE122435.1 is made up of 16 strains, of which 14 are the same strains as in DE122435.3, and 2 strains (STR00011 and STR00106) are replaced with closely related strains.

[0404] To evaluate the effect of the DE122435.1 and DE122435.3 compositions on intestinal T cell responses, GF wild-type C57BL/6 mice were colonized with either DE122435.1 or DE821956.1, a bacterial composition known to have proinflammatory properties in vitro, DE122435.3 or DE916091.1, another bacterial composition known to have proinflammatory properties in vitro. After four weeks of colonization, colonic lamina propria lymphocytes were isolated for flow cytometric characterization of CD4+ T cell populations.

[0405] Mice colonized with DE122435.1 or DE122435.3 were found to induce a significant expansion of Foxp3+RORγt+ T cells, which represent a stable regulatory T cell (Treg) lineage known to have a highly anti-inflammatory phenotype in vivo (Yang et al., Mucosal Immunol. 2016 March; 9(2):444-57, 2016), relative to the negative controls DE821956.1 or DE916091.1 colonized mice and germ-free mice (FIG. 21A). Additionally, DE122435.1 or DE122435.3 treatment did not increase the frequency of pro-inflammatory Th1 and Th17 cells; therefore, the ratio of Treg:Th1 (FIG. 21B) and Treg:Th17 (FIG. 21C) were higher in DE122435.1 and DE122435.3 colonized mice as compared to the DE821956.1 and DE916091.1 colonized mice and mice that remained germ-free.

[0406] Together, these data show that compositions of the bacterial compositions disclosed herein significantly increased regulatory T cells and the ratio of Treg:Th1 and Treg:Th17 in the colon, both of which are important to promote immune homeostasis and counterbalance inflammatory conditions. Preclinical data shows that DE122435.1 and DE122435.3 can reduce inflammation in the epithelial barrier, as measured in vitro, and in the colonic lamina propria of mice via assessments of Treg cells and pro-inflammatory Th1 and Th17 cells.

### Example 10: In Vivo Tolerability and Pharmacological Summary

[0407] Further to Examples 2 and 3 provided above, both the tolerability and pharmacological analysis of the different bacterial compositions disclosed herein were assessed in the VRE and CRE animal models.

[0408] Administration of DE122435.3 did not cause mortality or adverse clinical symptoms (lethargy, hunched posture, rectal bleeding, significant weight loss) in numerous studies across multiple mouse models. In the VRE and CRE colonization mouse models, mice receive antibiotic conditioning followed by VRE or CRE challenge. Control arms (no DE122435.3 dosing) do not exhibit any clinical symptoms or mortality. The addition of 3-6 days of daily DE122435.3 dosing by oral gavage in these models (n=34 mice) did not cause any change in clinical observations and no mortality was observed, suggesting that DE122435.3 treatment was well-tolerated. Additionally, DE122435.3 was dosed in GF mice (n=30 mice) and over a 4-6 week colonization period, no mortality or adverse clinical symptoms were observed. Together, these data support that DE122435.3 treatment, at doses found to be efficacious in the VRE and CRE colonization models, is well-tolerated in mice.

[0409] DE122435.3 was tested in vivo in VRE and CRE colonization models as well as dosed in GF mice. In these mouse models, DE122435.3 was well-tolerated and demonstrated efficacy by reducing both VRE and CRE titers by more than 99% (2-3 Log) over several weeks. DE122435.3 was screened in vitro in IECs and shown to decrease TNF-α driven secretion of the inflammatory cytokine IL-8, and lack of induction of IL8 secretion in the absence of TNF-α suggesting that DE122435.3 can modulate relevant inflammatory pathways. When the highly related composition DE673670.1 was tested in an in vitro epithelial barrier model, the composition led to a significant reduction in barrier permeability after IFN-γ treatment. Additionally, a GF mouse model of immunomodulation was used to assess the impact of DE122435.3 and the highly related composition, DE122435.1, on immune cell populations in the colon, specifically the ratio of Treg to Th1 and Treg to Th17 cells in the colonic lamina propria. GF mice have dramatically reduced colonic lamina propria CD4+ T cells relative to conventional mice and the colonization of GF mice with bacteria induces rapid expansion and differentiation of CD4+ T cell populations. Among the cells most highly induced by colonization are Th1 and Th17 effector T cells and regulatory T cells (Tregs). Variations in microbial composition can alter the balance of Tregs to Th1 and Th17, inducing either immune homeostasis or an inflammatory environment in the gut. In HSCT, Treg-mediated regulation of Th1 and Th17 inflammatory responses is a crucial factor in alleviating GvHD. Colonization with DE122435.3 and DE122435.1 led to a significantly increased frequency of Tregs and did not increase the frequency of pro-inflammatory Th1 or Th17 effector T cells in the colon compared to mice colonized with an inflammatory composition (DE916091.1). Thus, colonization with DE122435.3 or DE122435.1 resulted in a higher ratio of Tregs to Th1 and Treg to Th17, both of which are important to promote immune homeostasis and counterbalance inflammatory conditions. Given these data, it is anticipated that in addition to significantly reducing VRE and CRE burden in mice (see, e.g., Examples 2 and 3), DE122435.3 will promote immune homeostasis and protect against epithelial barrier damage in vitro.

### Example 11: Analysis of the Anti-Tumor Effect of Designed Bacterial Compositions in Combination with Immune Checkpoint Inhibitor (ICI) Antibodies in a CT26 Tumor Model

[0410] To assess whether the designed compositions disclosed herein could also be useful in treating cancers, a CT26 tumor model was used. Briefly, approximately three weeks prior to tumor inoculation, the DE122435.3 or negative control DE821956.1 composition was administered to the germ-free animals. DE122435.3 was administered once at a dose of 10⁷ per strain (see triangle mark in FIG. 22A) and allowed to colonize the gastrointestinal tract of the animals for 3 weeks. Then, a total of 5×10⁵ of the CT26 tumor cells were transplanted into the animals (via subcutaneous administration) (see circle mark in FIG. 22A). Once the tumors had reached an optimal size, the animals were randomized and further treated with one of the following: (i) isotype antibody or (ii) combination of ICI antibodies (i.e., anti-PD-L1+anti-CTLA-4). The antibodies were administered (via intraperitoneal administration) to the animals at a dose of 200 μg/ml at days 10, 14, 17, and 21 post tumor inoculation (see diamond marks in FIG. 22A). Tumor volume was measured at days 10, 14, 17, and 21 post tumor inoculation. At day 22, the animals were sacrificed and the anti-tumor immune response was assessed in various tissues. Fecal pellets were collected at week −3, week −1, day 0, days 10, 17, and 22 post tumor inoculation for next generation sequencing analysis.

[0411] As shown in FIG. 22B, prior to the administration of the ICI antibodies, tumor volume was comparable among the different groups. However, at day 21 post tumor inoculation when the last antibody dose was administered to the animals, animals that received both the DE122435.3 composition and the combo ICI antibodies had greater reduction in tumor volume, compared to the control animals or the isotype groups. The increased reduction in tumor volume was apparent as early as day 14 post tumor inoculation (i.e., when the second dose of the ICI antibodies was administered) (FIGS. 23A, 23B, and 23C). The reduced tumor volume was not solely due to the ICI antibodies, as animals that were colonized with the negative control DE 821956.1 composition and subsequently treated with the ICI antibodies had significantly greater tumor volume (e.g., similar to the control animals).

[0412] The improved effect on tumor volume was associated with increased T cell immune response in the tumors, resulting in increased frequency of total T cells (i.e., CD45+ cells) and particularly CD8+ T cells (FIGS. 24A and 24B). Moreover, greater percentage of the CD8+ T cells in the tumors of animals that received both the DE122435.3 composition and the ICI antibodies had a greater effector phenotype compared to the other treatment groups. For instance, greater percentage of the CD8+ T cells were CD25+CD69+ and/or expressed intermediate level of PD-1 (i.e., markers for early T cell activation) (FIGS. 25A and 25B). There was also a greater frequency of CD8+ T cells that were GranzymeB+ in the tumors of animals that received both the DE122435.3 composition and the ICI antibodies (FIG. 25C). Similar increase was observed with migratory CD103+CD8+ T cells that expressed either GranzymeB+ or CD25+CD69+ double positives (CD103 is a migratory marker that help direct CD8+ T cells to tumor microenvironment and distinguishes them from tissue resident CD8+ T cells)(FIGS. 26A, 26B, and 26C). In agreement with the enhanced CD8+ T cell immune response described above, the CD8+ T cells present in the tumors of animals that received both the DE122435.3 composition and the ICI antibodies were less exhausted (FIGS. 27A, 27B, 27C, and 27D).

[0413] In addition to improved CD8+ T cell immune response, animals that were first colonized with the DE122435.3 composition and then subsequently treated with the ICI antibodies also exhibited a greater innate immune response compared to animals from the other treatment groups. For example, greater percentage of the dendritic cells present in the tumor tissues were of a mature (i.e., activated phenotype) compared to dendritic cells from the other treatment groups (FIGS. 28A, 28B, 28C, and 28D). On the other hand, macrophages in tumor microenvironment occur in two polarization states: M1 (anti-tumor activity) and M2 (aid in tumor growth) with CD11b+F4/80+ macrophages potentially capturing M2 phenotype which is significantly decreased in the tumors of animals that received both the DE122435.3 composition and the ICI antibodies (FIG. 28E). Again, the observed improved effect on innate immune response was not due solely to the administration of the ICI antibodies. Animals that were colonized with the negative control DE 821956.1 composition and then subsequently treated with the ICI antibodies did not exhibit an innate immune response.

[0414] The tumor-draining lymph nodes are pivotal in checkpoint therapy and are often first sites of metastasis. Accordingly, the anti-tumor immune response was also characterized in the tumor-draining lymph nodes of the animals from the different treatment groups. In animals that received both the DE122435.3 composition and the ICI antibodies, there was a modest decrease in the percentage of CD8+ T cells, compared to animals from the different treatment groups (FIG. 29B). However, as observed in the tumor tissues, greater percentage of the CD8+ T cells present in the tumor-draining lymph nodes were of an effector (i.e., activated) phenotype (FIGS. 29C-29F). Similarly, there was not only a greater frequency of total dendritic cells (FIG. 30A) in the tumor-draining lymph nodes but greater percentage of the dendritic cells were of an activated, mature phenotype in animals that received both the DE122435.3 composition and the ICI antibodies (FIG. 30B).

[0415] Next, to identify cellular and global pathways related to the effects described above, gene expression analysis of tumor samples of animals from the different treatment groups was carried out using a gene expression panel (available from NanoString Technologies). The genes upregulated and the pathways differentially regulated in the animals treated with DE122435.3 and the combo ICI antibodies or with DE821956.1 composition and the combo ICI antibodies were identified. Preliminary data showed there was a significant difference in gene expression profile between animals that were colonized with the negative control DE821956.1 composition and animals that were colonized with the DE122435.3 composition prior to the administration of the ICI antibodies.

[0416] Collectively, the above data demonstrate that when administered in combination with the combo immune checkpoint inhibitors, the DE122435.3 composition can be useful in treating certain cancers. Not to be bound by any one theory, the above data suggests that one or more bacterial strains present in the DE122435.3 composition can enhance the anti-tumor efficacy of immune checkpoint inhibitors (e.g., anti-PD-L1 and/or anti-CTLA-4 antibodies). Moreover, as described supra, cancers are generally not thought to be associated with pro-inflammatory responses, and cancer immunotherapy generally aims to increase host pro-inflammatory responses targeting cancer cells. Therefore, it was not reasonably expected that a bacterial composition designed to have anti-inflammatory properties (i.e., DE122435.3) would be effective for enhancing anti-tumor response. The result further highlights that a bacterial composition can be designed to target multiple immune pathways, and thereby, treat wide range of diseases, including both inflammatory diseases and cancers.

### Example 12: Analysis of the Effect of Designed Compositions on Human CD8 T Cell Activation

[0417] As shown in the examples above, when administered in combination with the combo immune checkpoint inhibitors, the designed bacterial compositions described herein (e.g., DE122435.3 composition) can induce the activation and expression of genes that are important in an efficacious anti-tumor immune response (e.g., mediated by CD8 T cells). To further assess the effects of the DE122435.3 composition a human CD8 T cell activation assay was constructed. The in vitro assay mimics in vivo T cell activation from antigen-presenting cells by utilizing the two activation signals CD3 and CD28, bound to a three-dimensional bead similar in size to the antigen-presenting cells.

[0418] Briefly, the human primary CD8 T cells were thawed at 37° C. for 24 hr and activated by CD3 and CD28 at 37° C. for 2 days. The cells were treated at 37° C. for 24 hr with bacterial supernatants from different bacterial compositions, including DE122435.3, DE916091.1, and DE821956.1, or negative control bacterial media. The cells were analyzed by flow cytometer for viability and proliferation. The cell lysates were used in gene expression analysis using multiplexed molecular barcode (available from NanoString Technologies) or multiplex panels.

[0419] The gene expression was analyzed in the cells treated with the bacterial supernatants and results are shown in Table 5 and FIGS. 31A-31I. As shown in Table 5 below, DE122435.3 supernatants induced signification gene expression changes in T cells, differently from DE821956.1 and the negative control.

TABLE 5
Pathway-level z scores identifying the gene expression changes of the treated T cells.

| | bacterial | bacterial | | | | |
|---|---|---|---|---|---|---|
| | media | media | DE821956.1 | DE821956.1 | DE122435.3 | DE122435.3 |
| Activation | −5.1342 | −5.6094 | 0.7897 | 0.9066 | 4.9715 | 4.0758 |
| Antigen | −1.0659 | −1.3084 | −0.0653 | 0.0024 | 1.3300 | 1.1072 |
| processing & | | | | | | |
| presentation | | | | | | |
| Chemokine | −2.4862 | −2.8808 | 0.7337 | 0.5964 | 2.1137 | 1.9232 |
| Signaling | | | | | | |
| Costimulatory | −1.8123 | −2.3025 | 0.4524 | 0.6192 | 1.6514 | 1.3918 |
| Molecules | | | | | | |
| Cytotoxicity | −2.3316 | −2.3982 | 0.3491 | 0.4137 | 2.0807 | 1.8863 |
| Glycolysis | −0.5747 | −0.6413 | −0.0955 | 0.0792 | 0.7012 | 0.5310 |
| Interactions with | −1.6440 | −1.6779 | 0.0226 | 0.0545 | 1.6857 | 1.5590 |
| Non-lymphoid | | | | | | |
| Cells | | | | | | |
| Interleukin | −3.0890 | −2.8270 | 0.5350 | 0.5133 | 2.6278 | 2.2399 |
| Signaling | | | | | | |
| Oxidative | 0.8769 | 0.0391 | 0.2540 | 0.5228 | −0.8855 | −0.8073 |
| phosphorylation | | | | | | |
| T-cell migration | −1.9986 | −2.0547 | 0.1934 | 0.1443 | 1.9883 | 1.7273 |
| TCR signaling | −2.6098 | −3.0181 | 0.4743 | 0.7160 | 2.4112 | 2.0264 |
| Toxicity | −5.1566 | −5.3018 | 0.8145 | 0.7735 | 4.7381 | 4.1324 |
| Type I interferon | −1.9067 | −1.8725 | 0.1505 | 0.1518 | 1.9064 | 1.5706 |
| signaling | | | | | | |
| Type II interferon | −1.9809 | −2.3533 | 0.2006 | 0.2080 | 2.1395 | 1.7861 |
| signaling | | | | | | |

[0420] The bacterial composition stimulated the activation, cytotoxicity and cytokine production by T cells as shown in FIGS. 31A-31I. Particularly as shown in FIGS. 31A-C, treatment with DE122435.3 decreased the expression of CD45RA (a gene highly expressed in naïve T cells and downregulated with activation) and increased the expression of CD45RO and CD69, two markers of T cell activation. Additionally, as shown in FIG. 31D-G, treatment with DE122435.3 resulted in increased expression of the cytokines and cytotoxic molecules IL-24, TNF, perforin and IFNγ, respectively. FIG. 31H and 31I also show the enhanced production of IFNγ protein quantified by multiplexed bead-based (e.g., available from Luminex) and flow cytometry assays, respectively.

[0421] Effects of treatment with DE122435.3 on the expression of T cell inhibitory receptors were also evaluated as shown in FIG. 32A-E. The assays use CD3/CD28 activation that does not require feeder cells (antigen-presenting cells) or antigen. The primary human T cells were treated with bacterial supernatants from compositions including DE122435.3, DE821956.1, or negative control bacterial media. The gene expression of the treated T cells of all treatment groups was quantified by a gene expression panel available from NanoString Technologies. Treatment with DE122435.3 caused a decrease in the inhibitory receptors/exhaustion markers TIGIT and LAG-3 compared to the bacterial media and DE821956.1 controls. Given the induction of activation markers, enhancement of cytokine and perforin production and reduction in some inhibitory receptors, the results show the ability of the bacterial composition to enhance T cell activation and function.

[0422] The same assay described above was used to test whether individual bacterial strains can modulate the expression of genes involved in T cell activation and effector function. The results of the Nanostring gene expression assay show that bacterial supernatants from some single strains induce the expression of the CD8 T cell effector cytokines IFNγ and TNFα (FIGS. 34A-34B), cytotoxic molecules perforin and Granzyme B (FIGS. 34C-34D) and the activation marker CD69 (FIG. 34E).

[0423] Together, these results showed bacterial compositions as described herein can have direct effects on human CD8+ T cell activation and proliferation. Differentially regulated genes by designed bacterial compositions are involved in several pathways linked to anti-tumor immunity, including cytokine production, cytotoxicity, T cell exhaustion, and immune cell recruitment. To test whether these differences in gene expression translate to enhanced ability of CD8 T cells to kill target cells, a CD8 cytotoxicity assay was developed. CD8 T cells were thawed for 24 hours and activated using beads conjugated to α-CD3 and α-CD28 antibodies for 48 hours as described above. The activated CD8 T cells were subsequently co-cultured with HT29 cells, a colorectal cancer cell line, for another 24 hours in the presence of supernatants of DE122435.3, the negative controls DE916091.1 and DE821956.1 and bacterial media as background. A flow cytometer was used to determine the viability of both the CD8 T cells and the HT29 cells. The results showed that co-culturing activated CD8 T cells with the HT29 target cells in the presence of supernatants of DE122435.3 enhanced the CD8 T cells' cytotoxicity and their ability to kill HT29 target cells compared to the bacterial media background and the negative controls DE916091.1 and DE821956.1 (FIG. 33). The same assay was used to test the ability of single bacterial strains to enhance CD8 T cell cytotoxicity. FIGS. 35A-35B show enhanced killing of HT29 target cells when the CD8 T cells were treated with supernatants from two single bacterial strains.

### Example 13: Analysis of the Effect of Designed Compositions on Systemic Inflammation in 5-FU Induced Murine Mucositis Model

[0424] To assess the effect of the designed compositions disclosed herein on circulating inflammatory cytokine levels in response to local GI damage, a chemotherapy-induced murine mucositis model was used with DE486373.1 versus a composition designed to be inflammatory (IgA+, DE916091.1). Briefly, following an acclimation period, germ-free mice were orally dosed with DE486373.1 or DE916091.1. Five weeks post colonization, either 200 mg/kg 5-FU (fluorouracil) or 0.9% saline (vehicle control) was administered intraperitoneally over 3 consecutive days. Body weight was monitored daily and clinical observation was performed twice a week. Fecal pellets were collected for 16Sv4 sequencing. Serum for cytokine analysis and pieces of small intestine/colon were taken for histopathology analysis on necropsy days (day 5 and day 8).

[0425] To evaluate the levels of murine cytokines and chemokines in the serum, blood was collected on days 5 and 8 in microcentrifuge tubes, allowed to clot, centrifuged, and serum collected. The Luminex xMAP mouse cytokine/chemokine immunoassay was conducted per the manufacturer's instructions (Milliplex). Results were acquired with a Luminex MagPix instrument and analyzed with xPONENT software (Luminex corporation). Upon analyzing the Luminex data, statistical analysis of G-CSF, IFNγ, IL-6, IP-10, KC, MCP-1, MIP-2, MIG, and TNFα was done using GraphPad Prism to confirm significantly differential levels between the two groups of mice. As compared to DE916091.1, mice colonized with DE486373.1 recovered the initial body weight loss due to 5-FU treatment from day 5 following 5-FU administration (FIG. 36). Across the Luminex panel of 32 cytokines and chemokines, mice colonized with DE486373.1 showed no discernable increase in any analyte measured at days 5 and 8 following 5-FU administration (FIGS. 37A-37R and 38). However, mice colonized with DE916091.1, which was designed as an inflammatory composition, showed a significant increase in proinflammatory factors like G-CSF, IL-6, IFNγ, TNFα, IP-10, KC, MCP-1, MIG and MIP-2 systemically when measured at day 8 compared to day 5 (FIGS. 37A-37R and 38).

[0426] These findings suggest that colonization of germ-free mice with DE486373.1 does not increase any circulating inflammatory cytokines analysed in a chemotherapy-induced mucositis model, as compared to colonization with the inflammatory composition DE916091.1. Proinflammatory cytokines such as Granulocyte colony-stimulating factor (G-CSF), Interleukin-6 (IL-6), Interferon-gamma (IFNγ), and tumor necrosis factor alpha (TNFα) are known to impair epithelial barrier function. On the other hand, chemokines such as CXCL1 (KC), CXCL2 (MIP-2) and CXCL9 (MIG) have been shown to recruit neutrophils, monocytes/macrophages or activated T cells to the site of infection/inflammation. Furthermore, these circulatory factors play a critical role in the damage and regeneration phases of the small intestine upon 5-FU chemotherapy. Thus, DE486373.1 ameliorates the systemic inflammation resulting from gut epithelial barrier damage caused by 5-FU (FIG. 38).

[0427] It is to be appreciated that the Detailed Description section, and not the Summary and Abstract sections, is intended to be used to interpret the claims. The Summary and Abstract sections may set forth one or more but not all exemplary embodiments of the present invention as contemplated by the inventor(s), and thus, are not intended to limit the present invention and the appended claims in any way.

[0428] The present invention has been described above with the aid of functional building blocks illustrating the implementation of specified functions and relationships thereof. The boundaries of these functional building blocks have been arbitrarily defined herein for the convenience of the description. Alternate boundaries can be defined so long as the specified functions and relationships thereof are appropriately performed.

[0429] The foregoing description of the specific embodiments will so fully reveal the general nature of the invention that others can, by applying knowledge within the skill of the art, readily modify and/or adapt for various applications such specific embodiments, without undue experimentation, without departing from the general concept of the present invention. Therefore, such adaptations and modifications are intended to be within the meaning and range of equivalents of the disclosed embodiments, based on the teaching and guidance presented herein. It is to be understood that the phraseology or terminology herein is for the purpose of description and not of limitation, such that the terminology or phraseology of the present specification is to be interpreted by the skilled artisan in light of the teachings and guidance.

[0430] The breadth and scope of the present invention should not be limited by any of the above-described exemplary embodiments, but should be defined only in accordance with the following claims and their equivalents.

[0431] The claims in the instant application are different than those of the parent application or other related applications. The Applicant therefore rescinds any disclaimer of claim scope made in the parent application or any predecessor application in relation to the instant application. The Examiner is therefore advised that any such previous disclaimer and the cited references that it was made to avoid, may need to be revisited. Further, the Examiner is also reminded that any disclaimer made in the instant application should not be read into or against the parent application.

What is claimed is:

1. A composition comprising a purified population of bacteria, wherein the purified population of bacteria comprises two or more bacteria, wherein the first purified population of bacteria have a 16S rDNA sequence that is at least 97%, identical to a 16S rDNA sequence set forth in SEQ ID NOs: 19, 21, 31, 35, 36, 42, 44, 80, 85, 99, 104, 105, 162, 166, 183, 193, 197, 205, 215, 222, 226, 231, 233, 235, and 241-341, and wherein the second purified population of bacteria are:
(i) capable of reducing VRE and CRE carriage and restore colonization resistance in the GI tract of a mammal as compared to a reference (e.g., composition that does not include one or more of the bacteria in the composition);
(ii) capable of protecting the epithelial barrier from cytokine-mediated inflammatory damage;
(iii) capable of reducing inflammation in the epithelial barrier, as measured by IL-8 secretion and/or modulation of inflammatory pathway gene expression in vitro or in the colonic lamina propria of mice as compared to a reference (e.g., composition that does not include one or more of the bacteria in the composition);
or a combination of any of (i), (ii), and (iii).

2. A composition comprising a purified population of bacteria, wherein the purified population of bacteria comprises one or more bacteria having a 16S rDNA sequence that is at least 85%, at least 90%, at least 95%, at least 96%, at least 97%, at least 98%, at least 99%, or 100% identical to a 16S rDNA sequence set forth in SEQ ID NOs: 1-352.

3. A composition comprising a purified population of bacteria, wherein the purified population of bacteria comprises Eubacterium maltosivorans, Clostridium aldenense, Clostridium bolteae, Clostridium glycyrrhizinilyticum, Clostridium hylemonae, Clostridium innocuum, Clostridium lavalense, Clostridium scindens, Clostridium spiroforme, Clostridium symbiosum, Eubacterium rectale, Ruminococcus gnavus, Ruminococcus torques, Absiella dolichum, Agathobaculum desmolans, Akkermansia muciniphila, Alistipes finegoldii, Alistipes shahii, Anaerofustis stercorihominis, Anaeromassilibacillus senegalensis, Anaerostipes caccae, Anaerotruncus colihominis, Bacteroides caccae, Faecalibacterium prausnitzii, Faecalicatena contorta, Faecalicatena orotica, Flavonifractor plautii, Gemmiger formicilis, Harryflintia acetispora, Holdemania filiformis, Holdemania massiliensis, Intestinimonas butyriciproducens, Lachnospira pectinoschiza, Lachnospiraceae bacterium 5 1 57FAA, Lactobacillus fermentum, Lactonifactor longoviformis, Longibaculum muris, Longicatena caecimuris, Murimonas intestina, Oscillibacter ruminantium, Bacteroides eggerthii, Bacteroides faecis, Bacteroides intestinalis, Bacteroides koreensis, Bacteroides kribbi, Bacteroides salyersiae, Bacteroides uniformis, Bacteroides vulgatus, Bacteroides xylanisolvens, Barnesiella intestinihominis, Bifidobacterium dentium, Bifidobacterium longum, Bifidobacterium stercoris, Blautia coccoides, Blautia hominis, Blautia hydrogenotrophica, Blautia luti, Blautia obeum, Blautia producta, Blautia wexlerae, Butyricimonas faecihominis, Cellulosilyticum lentocellum, Clostridium butyricum, Ruthenibacterium lactatiformans, Sellimonas intestinalis, Shigella flexneri, Terrisporobacter mayombei, Terrisporobacter petrolearius, Turicibacter sanguinis, Tyzzerella nexilis, Clostridium disporicum, Clostridium subterminale, Clostridium tertium, Collinsella aerofaciens, Coprococcus comes, Coprococcus eutactus, Dorea longicatena, Drancourtella massiliensis, Eggerthella lenta, Eisenbergiella tayi, Emergencia timonensis, Erysipelatoclostridium ramosum, Eubacterium callanderi, Paeniclostridium sordellii, Parabacteroides distasonis, Parabacteroides merdae, Paraclostridium bifermentans, Peptostreptococcus stomatis, Robinsoniella peoriensis, Romboutsia timonensis, Roseburia intestinalis, Roseburia inulinivorans, Ruminococcus albus, Ruminococcus bromii, Ruminococcus faecis, Ruminococcus lactaris, or combinations thereof.

4. A composition comprising a purified population of bacteria, wherein the purified population of bacteria comprises a species selected from FIG. 1 or combinations thereof.

5. The composition of any one of claims 1 to 4, wherein the purified population of bacteria comprises at least two, three, four, five, six, seven, eight, nine, ten, eleven, twelve, thirteen, fourteen, fifteen, sixteen, seventeen, eighteen, nineteen, twenty, twenty-one, twenty-two, twenty-three, twenty-four, twenty-five, twenty-six, twenty-seven, twenty-eight, twenty-nine, thirty, or more bacteria.

6. A composition comprising a purified population of bacteria, wherein the composition comprises the purified population of bacteria selected from DE1-DE54 recited in FIG. 1.

7. The composition of claim 6, wherein the composition comprises the purified population of bacteria selected from DE8, DE10, DE11, or DE23 recited in FIG. 1.

8. The composition of claim 6 or 7, wherein the composition comprises the purified population of bacteria from DE10 or DE8.

9. The composition of any one of claims 1-8, wherein the composition decreases an infection, including an infection caused by an ESKAPE pathogen (including Enterococcus faecium, Staphylococcus aureus, Klebsiella pneumoniae, Acinetobacter baumannii, Pseudomonas aeruginosa, and Enterobacter spp.) compared to a reference (e.g., a composition that does not include one or more of the bacteria disclosed herein).

10. The composition of any one of claims 1-9, wherein the composition decreases an infection, including an infection caused by an Enterococcus species including an Enterococcus species selected from Enterococcus faecalis and Enterococcus faecium compared to a reference (e.g., a composition that does not include one or more of the bacteria disclosed herein).

11. The composition of any one of claims 1-9, wherein the composition decreases an infection, including an infection caused by an Enterobacteriaceae species including Klebsiella pneumonia compared to a reference (e.g., a composition that does not include one or more of the bacteria disclosed herein).

12. The composition of any one of claims 1-9, wherein the composition decreases an infection, including an infection caused by a bacterial species resistant to vancomycin or carbapenems compared to a reference (e.g., a composition that does not include one or more of the bacteria disclosed herein).

13. The composition of any one of claims 1-9, wherein the composition decreases an infection, including an infection caused by a drug resistant or multi-drug resistant (MDROs) bacteria including a vancomycin-resistant Enterococcus spp. selected from Enterococcus faecalis and Enterococcus faecium, a carbapenem-resistant Enterobacteriaceae spp. selected from Klebsiella pneumonia, Klebsiella oxytoca, Klebsiella aerogenes, and Enterobacter spp., an extended spectrum beta-lactamase (ESBL) selected from E. coli and Klebsiella species, a methicillin-resistant Staphylococcus aureus (MRSA), or combinations thereof, compared to a reference (e.g., a composition that does not include one or more of the bacteria disclosed herein).

14. The composition of any one of claims 1 to 13, wherein the purified population of bacteria decreases the number and/or relative abundance of antibiotic resistant bacteria and/or an ESKAPE pathogen in a gastrointestinal tract of a subject compared to a reference (e.g., a composition that does not include one or more of the bacteria disclosed herein).

15. The composition of any one of claims 1 to 14, wherein the number of antibiotic resistant bacteria is measured as a colony forming unit per gram of a sample obtained from the subject.

16. The composition of any one of claims 1 to 15, wherein:
(i) the antibiotic resistant bacteria comprise vancomycin-resistant Enterococci or carbapenem-resistant Enterobacteriaceae or a combination thereof;
(ii) the antibiotic resistant bacteria comprise a drug resistant or multi-drug resistant (MDROs) bacteria including a vancomycin-resistant Enterococcus spp. selected from Enterococcus faecalis and Enterococcus faecium, a carbapenem-resistant Enterobacteriaceae spp. selected from Klebsiella pneumonia, Klebsiella oxytoca, Klebsiella aerogenes, and Enterobacter spp., an extended spectrum beta-lactamase (ESBL) selected from E. coli and Klebsiella species, a methicillin-resistant Staphylococcus aureus (MRSA), or combinations thereof;
(iii) the ESKAPE pathogen comprises Enterococcus faecium, Staphylococcus aureus, Klebsiella pneumoniae, Acinetobacter baumannii, Pseudomonas aeruginosa, and Enterobacter spp., or a combination thereof; or
(iv) the antibiotic resistant bacteria and ESKAPE pathogen are selected from (i) and (iii), (ii) and (iii), or (i), (ii), and (iii).

17. The composition of any one of claims 1 to 16, wherein one or more bacteria of the purified population of bacteria competes for carbon-sources with the antibiotic resistant bacteria.

18. The composition of any one of claims 1 to 16, wherein the purified population of bacteria improves epithelial barrier integrity, reduces inflammation, and/or reduces mucositis in a gastrointestinal tract of a subject compared to a reference (e.g., a composition that does not include one or more of the bacteria disclosed herein, a corresponding reference in a subject that did not receive the composition disclosed herein, or a corresponding reference in the subject prior to the administration of the composition).

19. The composition of any one of claims 1 to 18, wherein the purified population of bacteria decreases mortality due to an invasive infection in a subject compared to a reference (e.g., a composition that does not include one or more of the bacteria disclosed herein, a corresponding reference in a subject that did not receive the composition disclosed herein, or a corresponding reference in the subject prior to the administration of the composition).

20. The composition of claim 19, wherein the invasive infection in the subject is an antibiotic resistant infection.

21. The composition of any one of claims 1 to 20, wherein the purified population of bacteria reduces transplantation-related complications in a subject compared to a reference (e.g., a composition that does not include one or more of the bacteria disclosed herein, a corresponding reference in a subject that did not receive the composition disclosed herein, or a corresponding reference in the subject prior to the administration of the composition).

22. The composition of any one of claims 1 to 21, wherein the purified population of bacteria increases the overall survival and/or progression-free survival of a subject compared to a reference (e.g., a corresponding reference in a subject that did not receive the composition disclosed herein or corresponding reference in the subject prior to the administration of the composition).

23. The composition of any one of claims 1 to 22, wherein the purified population of bacteria modulates a biological activity, wherein the biological activity comprises short-chain fatty acid production, medium-chain fatty acid production, tryptophan metabolite production, fucosidase activity, Wnt activation, anti-IL-8 activity, carbon source utilization, bile acid metabolism, or combinations thereof.

24. The composition of any one of claims 2 to 23, wherein the purified population of bacteria comprises one or more bacteria having one or more features selected from the group consisting of:
(i) capable of reducing VRE and CRE carriage and restore colonization resistance in the GI tract of a mammal;
(ii) capable of protecting the epithelial barrier from cytokine-mediated inflammatory damage;
(iiii) capable of reducing inflammation in the epithelial barrier, as measured by IL-8 secretion in vitro, and in the colonic lamina propria of mice;
and combinations thereof.

25. The composition of any one of claims 1 to 24, wherein the purified population of bacteria comprises one or more bacteria having one or more features selected from:
(i) capable of engrafting (long-term and/or transient) when administered to a subject, (ii) capable of having anti-inflammatory activity (e.g., inhibiting TNF-α-driven IL-8 secretion in epithelial cells in vitro, ability to down-modulate expression of inflammatory genes (e.g., CXCL1, CXCL2, CXCL3, CXCL11, ICAM1)), (iii) not capable of inducing pro-inflammatory activity, (iv) capable of producing a secondary bile acid (e.g., 7α-dehydroxylase and bile salt hydrolase activity), (v) capable of producing a tryptophan metabolite (e.g., indole, 3-methyl indole, indolepropionic acid), (vi) capable of restoring epithelial integrity as determined by a primary epithelial cell monolayer barrier integrity assay, (vii) capable of being associated with reduction of risk of infection or GvHD following HSCT, (viii) capable of not being associated with clinical non-remission of infection or GvHD following HSCT, (ix) capable of producing a short-chain fatty acid (e.g., butyrate, propionate), (x) capable of inhibiting a HDAC activity, (xi) capable of producing a medium-chain fatty acid (e.g., valerate, hexanoate), (xii) capable of expressing catalase activity, (xiii) capable of having alpha-fucosidase activity, (xiv) capable of inducing Wnt activation, (xv) capable of producing a B vitamin (e.g., thiamin (B1) and/or pyridoxamine (B6)), (xvi) capable of reducing fecal calprotectin level, (xvii) not capable of activating a toll-like receptor pathway (e.g., TLR4 or TLR5), (xviii) capable of activating a toll-like receptor pathway (e.g., TLR2), (xix) capable of restoring colonization resistance, (xx) capable of a broad range of carbon source utilization; (xxi) capable of reducing VRE pathogen carriage, (xxii) capable of reducing CRE pathogen carriage, (xxiii) capable of reducing expression of claudin-2, (xxiv) capable of being associated with the healthy human gut microbiota, (xxv) capable of not being associated with toxin and hemolysin genes associated with Clostridial pathogens and no significant cytopathic effects in vitro, (xxvi) susceptible to multiple clinically relevant antibiotics, (xxvii) capable of not being associated with genes that are both likely responsible for the observed antibiotic resistances and transmissible, (xxxviii) capable of inhibiting epithelial cell apoptosis, (xxix) capable of down-modulating one or more genes induced in IFN-γ treated colonic organoids (e.g., those associated with inflammatory chemokine signaling, NF-κB signaling, TNF family signaling, type I interferon signaling, type II interferon signaling, TLR signaling, lymphocyte trafficking, Th17 cell differentiation, Th1 differentiation, Th2 differentiation, apoptosis, inflammasomes, autophagy, oxidative stress, MHC class I and II antigen presentation, complement, mTor, nod-like receptor signaling, PI3K signaling, or combinations thereof), (xxx) capable of reducing the expression of one or more inhibitory receptors (e.g., TIGIT, TIM-3, or LAG-3) on CD8+ T cells, (xxxi) capable of increasing expression of one or more genes/proteins associated with CD8+ T cell activation and/or function (e.g., CD45RO, CD69, IL-24, TNF-α, perforin, or IFN-γ), (xxxii) capable of enhancing the ability of CD8+ T cells to kill tumor cells, (xxxiii) capable of enhancing the efficacy of an immune checkpoint inhibitor therapy, (xxxiv) capable of promoting the recruitment of CD8+ T cells to tumors, (xxxv) capable of inducing an anti-inflammatory IL-10-skewed IL-10/IL-6 cytokine ratio in macrophages, (xxxvi) capable of inducing less inflammatory responses but similar pathogen defense responses in macrophages than a donor-derived spore-based composition (i.e., a spore-based composition), (xxxvii) capable of increasing the amount of anti-inflammatory mediators in (e.g., IL-1 receptor antagonists (IL-1RA), IL-4, IL-10, IL-11, IL-13, TGF-β), (xxxviii) capable of reducing colonic inflammation, (xxxix) capable of treating and/or preventing a disease or disorder, such as those associated with dysbiosis of a gastrointestinal tract, (xl) capable of increasing the diversity of the gastrointestinal microbiome in a subject, (xli) capable of improving mucosal and/or epithelial barrier integrity in a subject compared to a reference control (e.g., untreated patients or the subject prior to treatment), (xlii) capable of promoting mucosal healing, (xliii) capable of reducing incidence of infection, (xliv) capable of reducing the need for antibiotics in a subject, (xlv) capable of increasing the probability of survival in a subject, (xlvi) capable of reducing the risk of relapse of primary cancer, (xlvii) capable of reducing the abundance of a biomarker of infection in the stool of a subject, (xlviii) capable of increasing the abundance of a biomarker of an administered species in the stool of a subject, (xlix) capable of targeted delivery of most (e.g., 70%, 75%, 80%, 85%, 90%, 95%, 96%, 97%, 98%, 99%, 99.5%, 99.6%, 99.7%, 99.8%, or 99.9% of the administered species relative to the number of colony forming units administered) or all of the administered species to the intestines of the subject (e.g., through encapsulation, or through coating one or more components of a dosage form with an enteric polymer), (l) capable of a therapeutic benefit following a single administration of a composition or pharmaceutical composition described herein to a subject, (li) capable of coadministration with an additional agent described herein, without substantially decreasing the therapeutic benefit of the administered species, (lii) capable of coadministration with a carrier or excipient described herein, without substantially decreasing the therapeutic benefit of the administered species, (liii), or any combination thereof.

26. The composition of claim 25, wherein the biological activity is modulated in vivo.

27. The composition of claim 25, wherein the biological activity is modulated in vitro (e.g., a culture or a synthetic gastrointestinal system).

28. The composition of any one of claims 1 to 24, wherein the purified population of bacteria comprises one or more bacteria having one or more features selected from:
(i) capable of utilizing a carbon source used by a pathogenic organism, such as but not limited to Enterococcus and Enterobacteriaceae species and ESKAPE pathogens (including: Enterococcus faecium, Staphylococcus aureus, Klebsiella pneumoniae, Acinetobacter baumannii, Pseudomonas aeruginosa, and Enterobacter spp.), Enterococcus species including, but not limited to, Enterococcus faecalis and Enterococcus faecium, Enterobacteriaceae species including, but not limited to, Klebsiella pneumonia, or such species that are resistant to vancomycin or carbapenems, drug resistant or multi-drug resistant (MDROs) including VRE, CRE (Klebsiella pneumonia, Klebsiella oxytoca, Klebsiella aerogenes, Enterococcus species), extended spectrum beta-lactamase (ESBLs) producing bacteria (E. coli, Klebsiella species), or methicillin-resistant Staphylococcus aureus (MRSA); (ii) capable of engrafting when administered to a subject; (iii) capable of producing short-chain fatty acids; (iv) capable of producing medium-chain fatty acids; (v) capable of producing tryptophan metabolites; (vi) capable of inhibiting histone deacetylase (HDAC) activity; (vii) capable of decreasing IL-8 secretion in intestinal epithelial cells (IECs) treated with TNF-α; (viii) lack of induction of IL8 secretion in intestinal epithelial cells (IECs) in the absence of TNF-α; and combinations thereof.

29. The composition of any one of claims 1 to 24, wherein the purified population of bacteria comprises one or more bacteria having one or more features selected from:
(i) capable of having anti-inflammatory activity in epithelial cells, (ii) not capable of inducing pro-inflammatory activity, (iii) capable of producing a secondary bile acid, (iv) capable of producing a tryptophan metabolite, (v) capable of restoring epithelial integrity, (vi) capable of producing a short-chain fatty acid, (vii) capable of inhibiting a HDAC activity, (viii) capable of producing a medium-chain fatty acid, (ix) capable of restoring colonization resistance, (x) capable of reducing VRE pathogen carriage, (xi) capable of reducing CRE pathogen carriage, (xii) capable of inhibiting epithelial cell apoptosis, (xiii) capable of down-modulating one or more genes induced in IFN-γ treated colonic organoids, (xiv) capable of reducing the expression of one or more inhibitory receptors, (xv) capable of increasing expression of one or more genes/proteins associated with CD8+ T cell activation and/or function, (xvi) capable of enhancing the ability of CD8+ T cells to kill tumor cells, (xvii) capable of enhancing the efficacy of an immune checkpoint inhibitor therapy, (xviii) capable of inducing an anti-inflammatory IL-10-skewed IL-10/IL-6 cytokine ratio in macrophages, (xix) capable of inducing less inflammatory responses but similar pathogen defense responses in macrophages than a natural composition, (xx) capable of reducing colonic inflammation, (xxi) capable of treating and/or preventing a disease or disorder, such as those associated with dysbiosis of a gastrointestinal tract, (xxii) capable of increasing the Treg:Th1 or Treg:Th17 ratios on the lamina propria of mice, and combinations thereof.

30. The composition of any one of claims 1 to 24, wherein the purified population of bacteria comprises one or more bacteria having one or more features selected from:
(i) capable of having anti-inflammatory activity in epithelial cells (e.g., inhibiting TNF-α-driven IL-8 secretion in epithelial cells in vitro, ability to down-modulate expression of inflammatory genes (e.g., CXCL1, CXCL2, CXCL3, CXCL11, ICAM1)), (ii) not capable of inducing pro-inflammatory activity, (iii) capable of restoring epithelial integrity as determined by a primary epithelial cell monolayer barrier integrity assay, (iv) capable of inhibiting epithelial cell apoptosis, (v) capable of down-modulating one or more genes induced in IFN-γ treated colonic organoids (e.g., those associated with inflammatory chemokine signaling, NF-κB signaling, TNF family signaling, type I interferon signaling, type II interferon signaling, TLR signaling, lymphocyte trafficking, Th17 cell differentiation, Th2 differentiation, apoptosis, inflammasomes, autophagy, oxidative stress, MHC class I and II antigen presentation, complement, mTor, nod-like receptor signaling, PI3K signaling, or combinations thereof), (vi) capable of reducing the expression of one or more inhibitory receptors (e.g., TIGIT, TIM-3, or LAG-3) on CD8+ T cells, (vii) capable of increasing expression of one or more genes/proteins associated with CD8+ T cell activation and/or function (e.g., CD45RO, CD69, IL-24, TNF-α, perforin, or IFN-γ), (viii) capable of enhancing the ability of CD8+ T cells to kill tumor cells, (ix) capable of enhancing the efficacy of an immune checkpoint inhibitor therapy, (x) capable of increasing the Treg:Th1 or Treg:Th17 ratios on the lamina propria of mice, and combinations thereof.

31. The composition of any one of claims 1 to 24, wherein the composition:
(i) increases frequency of Tregs and does not increase frequency of Th1 or Th17 effector T cells in the colon of a subject compared to a reference (e.g., a corresponding reference in a subject that did not receive the composition disclosed herein or corresponding reference in the subject prior to the administration of the composition),
(ii) the ratio of Tregs to Th1 effector T cells or Tregs to Th17 effector T cells in the colon of a subject compared to a reference (e.g., a corresponding reference in a subject that did not receive the composition disclosed herein or corresponding reference in the subject prior to the administration of the composition),
or (i) and (ii).

32. The composition of any one of claims 1 to 31, wherein the purified population of bacteria augments the number and/or relative abundance of spore-forming bacteria in a microbiome of a subject.

33. The composition of any one of claims 1 to 32, wherein the purified population of bacteria augments the number and/or relative abundance of non-pathogenic, commensal non-spore-forming bacteria in a microbiome of a subject.

34. The composition of any one of claims 1 to 33, wherein one or more bacteria of the purified population of bacteria are capable of being engrafted into a subject's microbiome when administered to the subject, wherein said engraftment is long-term or transient engraftment.

35. A pharmaceutical formulation comprising the composition of any one of claims 1 to 34 and a pharmaceutically acceptable excipient.

36. The pharmaceutical formulation of claim 35, wherein the excipient comprises glycerol.

37. The pharmaceutical formulation of claim 35 or 36, wherein the composition is lyophilized.

38. The pharmaceutical formulation of any one of claims 35 to 37, wherein the composition is formulated for oral delivery.

39. The pharmaceutical formulation of any one of claims 35 to 38, wherein the composition is encapsulated.

40. A method of treating a disease or disorder associated with an allogeneic immune response in a subject in need thereof, comprising administering to the subject an effective amount of the composition of any one of claims 1 to 34 or the pharmaceutical formulation of any one of claims 35 to 39.

41. The method of claim 40, wherein the allogeneic immune response is caused by an allogeneic hematopoietic stem cell transplantation (allo-HSCT) or an allogeneic organ transplantation.

42. The method of claim 40 or 41, wherein the disease or disorder associated with an allogenic immune response comprises graft-versus-host-disease (GvHD), viral infection or reactivation, invasive infection, blood stream infection, inflammation, or combinations thereof.

43. The method of claim 42, wherein the GvHD comprises an acute graft versus host disease (aGvHD) or a chronic graft versus host disease (cGvHD).

44. The method of any one of claims 40 to 43, wherein the subject suffers from a cancer.

45. The method of claim 44, wherein the cancer comprises acute myeloid leukemia (AML), acute lymphoblastic leukemia (ALL), myelodysplastic syndromes (MDS), myeloproliferative neoplasms (MPN), or combinations thereof.

46. A method of treating a disease or disorder associated with an autologous immune response in a subject in need thereof, comprising administering to the subject an effective amount of the composition of any one of claims 1 to 34 or the pharmaceutical formulation of any one of claims 35 to 39.

47. The method of claim 46, wherein the autologous immune response is caused by an autologous hematopoietic stem cell transplantation or an autologous organ transplantation.

48. The method of claim 46 or 47, wherein the disease or disorder associated with an autologous immune response comprises graft-versus-host-disease (GvHD), viral infection or reactivation, invasive infection, blood stream infection, inflammation, or combinations thereof.

49. The method of claim 48, wherein the GvHD comprises an acute graft versus host disease (aGvHD) or a chronic graft versus host disease (cGvHD).

50. The method of any one of claims 46 to 49, wherein the subject suffers from a cancer.

51. The method of claim 50, wherein the cancer comprises acute myeloid leukemia (AML), acute lymphoblastic leukemia (ALL), myelodysplastic syndromes (MDS), myeloproliferative neoplasms (MPN), or combinations thereof.

52. A method of treating, reducing, or alleviating a symptom associated with chemotherapy in a subject in need thereof, comprising administering to the subject an effective amount of the composition of any one of claims 1 to 34 or the pharmaceutical formulation of any one of claims 35 to 39.

53. The method of claim 52, wherein the symptom associated with chemotherapy comprises weight loss or an increase in the level of a proinflammatory mediator within a gastrointestinal tract of the subject.

54. The method of claim 53, wherein the weight loss is reduced by at least 10%, at least 20%, at least 30%, at least 40%, at least 50%, at least 60%, at least 70%, at least 80%, or at least 90% compared to a reference (e.g., corresponding value in a subject that did not receive the composition disclosed herein or corresponding value in the subject prior to the administration of the composition).

55. The method of claim 53, wherein the level of a proinflammatory mediator is reduced by at least 10%, at least 20%, at least 30%, at least 40%, at least 50%, at least 60%, at least 70%, at least 80%, or at least 90% compared to a reference (e.g., corresponding value in a subject that did not receive the composition disclosed herein or corresponding value in the subject prior to the administration of the composition).

56. The method of any one of claims 53 to 55, wherein the proinflammatory mediator comprises IFN-γ, IL-1b, IL-2, IL-6, IL-12, CXCL5, IL-17, CXCL1, VEGF, TNF-α, or combinations thereof.

57. The method of claim 56, wherein the level of a proinflammatory T cell is reduced by at least 10%, at least 20%, at least 30%, at least 40%, at least 50%, at least 60%, at least 70%, at least 80%, or at least 90% compared to a reference (e.g., corresponding value in a subject that did not receive the composition disclosed herein or corresponding value in the subject prior to the administration of the composition).

58. The method of claim 57, wherein the proinflammatory T cell comprises a CD8⁺ T cell.

59. The method of claim 56, wherein the level of an anti-inflammatory T cell is reduced by at least 10%, at least 20%, at least 30%, at least 40%, at least 50%, at least 60%, at least 70%, at least 80%, or at least 90% compared to a reference (e.g., corresponding value in a subject that did not receive the composition disclosed herein or corresponding value in the subject prior to the administration of the composition).

60. The method of claim 59, wherein the anti-inflammatory T cell comprises a FOXP3⁺ CD4⁺ T cell.

61. The method of claim 520, wherein the symptom associated with chemotherapy comprises inflammation.

62. The method of claim 52, wherein the treating, reducing, or alleviating a symptom associated with chemotherapy comprises treating, reducing, or alleviating inflammation.

63. The method of claim 62 wherein the treating, reducing, or alleviating inflammation is measured by analyzing one or more of G-CSF, IFNγ, IL-6, IP-10, KC, MCP-1, MIP-2, MIG, or TNFα.

64. The method of claim 62, wherein following the administration of an effective amount of the composition or pharmaceutical formulation the subject does not have an increased level of one or more of G-CSF, IFNγ, IL-6, IP-10, KC, MCP-1, MIP-2, MIG, or TNFα compared to a reference (e.g., corresponding value in a subject that did not receive the composition disclosed herein or corresponding value in the subject prior to the administration of the composition).

65. A method of preventing, reducing, or treating rejection in a subject undergoing transplantation (e.g., either HSCT or organ), comprising administering to the subject an effective amount of the composition of any one of claims 1 to 34 or the pharmaceutical formulation of any one of claims 35 to 39.

66. The method of claim 65, wherein the composition or the pharmaceutical formulation is administered to the subject prior to, during, and/or after the transplantation.

67. A method of modulating a biological activity in a subject in need thereof, comprising administering to the subject an effective amount of the composition of any one of claims 1 to 34 or the pharmaceutical formulation of any one of claims 35 to 39, wherein the biological activity comprises short-chain fatty acid production, medium-chain fatty acid production, tryptophan metabolite production, fucosidase activity, Wnt activation, anti-IL-8 activity, or combinations thereof.

68. The method of claim 67, wherein short-chain fatty acid production is increased by at least 10%, at least 20%, at least 30%, at least 40%, at least 50%, at least 60%, at least 70%, at least 80%, or at least 90% compared to a reference (e.g., corresponding activity in a subject that did not receive the composition disclosed herein or corresponding activity in the subject prior to the administration of the composition).

69. The method of claim 67, wherein medium-chain fatty acid production is increased by at least 10%, at least 20%, at least 30%, at least 40%, at least 50%, at least 60%, at least 70%, at least 80%, or at least 90% compared to a reference (e.g., corresponding activity in a subject that did not receive the composition disclosed herein or corresponding activity in the subject prior to the administration of the composition).

70. The method of claim 67, wherein tryptophan metabolite production is increased by at least 10%, at least 20%, at least 30%, at least 40%, at least 50%, at least 60%, at least 70%, at least 80%, or at least 90% compared to a reference (e.g., corresponding activity in a subject that did not receive the composition disclosed herein or corresponding activity in the subject prior to the administration of the composition).

71. The method of claim 67, wherein fucosidase activity is increased by at least 10%, at least 20%, at least 30%, at least 40%, at least 50%, at least 60%, at least 70%, at least 80%, or at least 90% compared to a reference (e.g., corresponding activity in a subject that did not receive the composition disclosed herein or corresponding activity in the subject prior to the administration of the composition).

72. The method of claim 67, wherein Wnt activation is increased by at least 10%, at least 20%, at least 30%, at least 40%, at least 50%, at least 60%, at least 70%, at least 80%, or at least 90% compared to a reference (e.g., corresponding activity in a subject that did not receive the composition disclosed herein or corresponding activity in the subject prior to the administration of the composition).

73. The method of claim 67, wherein anti-IL-8 activity is increased by at least 10%, at least 20%, at least 30%, at least 40%, at least 50%, at least 60%, at least 70%, at least 80%, or at least 90% compared to a reference (e.g., corresponding activity in a subject that did not receive the composition disclosed herein or corresponding activity in the subject prior to the administration of the composition).

74. A method of decreasing the number and/or relative abundance of antibiotic resistant bacteria in a gastrointestinal tract of a subject in need thereof, comprising administering to the subject an effective amount of the composition of any one of claims 1 to 34 or the pharmaceutical formulation of any one of claims 35 to 39.

75. The method of claim 74, wherein the number and/or relative abundance of antibiotic resistant bacteria is reduced by at least 10%, at least 20%, at least 30%, at least 40%, at least 50%, at least 60%, at least 70%, at least 80%, or at least 90%, or 1 log, 2 log, 3 log, 4 log, 5 log compared to a reference (e.g., corresponding number in a subject that did not receive the composition disclosed herein or corresponding number in the subject prior to the administration of the composition).

76. The method of claim 74 or 75, wherein the antibiotic resistant bacteria comprise vancomycin-resistant Enterococci or carbapenem-resistant Enterobacteriaceae.

77. The method of claim 74 or 75, wherein the antibiotic resistant bacteria comprise an ESKAPE pathogen (including Enterococcus faecium, Staphylococcus aureus, Klebsiella pneumoniae, Acinetobacter baumannii, Pseudomonas aeruginosa, and Enterobacter spp.).

78. The method of claim 74 or 75, wherein the antibiotic resistant bacteria comprise an Enterococcus species including an Enterococcus species selected from Enterococcus faecalis and Enterococcus faecium.

79. The method of claim 74 or 75, wherein the antibiotic resistant bacteria comprise an Enterobacteriaceae species including Klebsiella pneumonia.

80. The method of claim 74 or 75, wherein the antibiotic resistant bacteria comprise a drug resistant or multi-drug resistant (MDROs) bacteria including a vancomycin-resistant Enterococcus spp. selected from Enterococcus faecalis and Enterococcus faecium, a carbapenem-resistant Enterobacteriaceae spp. selected from Klebsiella pneumonia, Klebsiella oxytoca, Klebsiella aerogenes, and Enterobacter spp., an extended spectrum beta-lactamase (ESBL) selected from E. coli and Klebsiella species, a methicillin-resistant Staphylococcus aureus (MRSA), or combinations thereof.

81. A method of improving epithelial barrier status, reducing inflammation, and/or reducing mucositis in a gastrointestinal tract of a subject in need thereof, comprising administering to the subject an effective amount of the composition of any one of claims 1 to 34 or the pharmaceutical formulation of any one of claims 35 to 39.

82. The method of claim 81, wherein the epithelial barrier status in the gastrointestinal tract of the subject is improved by at least 5%, at least 10%, at least 20%, at least 30%, at least 40%, at least 50%, at least 60%, at least 70%, at least 80%, or at least 90% compared to a reference (e.g., corresponding value in a subject that did not receive the composition disclosed herein or corresponding activity in the subject prior to the administration of the composition).

83. The method of claim 81, wherein the inflammation in the gastrointestinal tract of the subject is reduced by at least 5%, at least 10%, at least 20%, at least 30%, at least 40%, at least 50%, at least 60%, at least 70%, at least 80%, or at least 90% compared to a reference (e.g., corresponding value in a subject that did not receive the composition disclosed herein or corresponding activity in the subject prior to the administration of the composition).

84. The method of claim 81, wherein the mucositis in the gastrointestinal tract of the subject is reduced by at least 5%, at least 10%, at least 20%, at least 30%, at least 40%, at least 50%, at least 60%, at least 70%, at least 80%, or at least 90% compared to a reference (e.g., corresponding value in a subject that did not receive the composition disclosed herein or corresponding activity in the subject prior to the administration of the composition).

85. A method of decreasing mortality due to an invasive infection in a subject in need thereof, comprising administering to the subject an effective amount of the composition of any one of claims 1 to 34 or the pharmaceutical formulation of any one of claims 35 to 39, wherein the subject is undergoing transplantation.

86. The method of claim 85, wherein the invasive infection in the subject is an antibiotic resistant infection.

87. A method of reducing transplantation-related complications in a subject in need thereof, comprising administering to the subject an effective amount of the composition of any one of claims 1 to 34 or the pharmaceutical formulation of any one of claims 35 to 39, wherein the subject is undergoing transplantation.

88. A method of increasing the overall survival and/or progression-free survival of a subject in need thereof, comprising administering to the subject an effective amount of the composition of any one of claims 1 to 34 or the pharmaceutical formulation of any one of claims to 39, wherein the subject is undergoing transplantation.

89. The method of any one of claims 40 to 88, wherein the subject is undergoing or has undergone transplantation.

90. The method of claim 89, wherein the transplantation is an allogeneic hematopoietic stem cell transplantation (allo-HSCT) or an allogeneic organ transplantation.

91. The method of claim 89, wherein the transplantation is an autologous hematopoietic stem cell transplantation or an autologous organ transplantation.

92. The method of any one of claims 52 to 91, wherein the subject suffers from a cancer.

93. The method of claim 92, wherein the cancer comprises acute myeloid leukemia (AML), acute lymphoblastic leukemia (ALL), myelodysplastic syndromes (MDS), myeloproliferative neoplasms (MPN), or combinations thereof.

94. A method of treating and/or reducing the risk of an infection in a subject in need thereof, comprising administering to the subject an effective amount of the composition of any one of claims 1 to 34 or the pharmaceutical formulation of any one of claims 35 to 39.

95. The method of claim 94, wherein the infection includes a blood stream infection, sepsis, tissue infection, invasive infection, a gastrointestinal infection, a viral infection or reactivation, or a combination thereof.

96. The method of claim 95, wherein the infection is a viral infection or reactivation.

97. The method of claim 94 or 95, wherein the infection is caused by an ESKAPE pathogen (including Enterococcus faecium, Staphylococcus aureus, Klebsiella pneumoniae, Acinetobacter baumannii, Pseudomonas aeruginosa, and Enterobacter spp.).

98. The method of claim 97, wherein the infection is caused by an Enterococcus species including an Enterococcus species selected from Enterococcus faecalis and Enterococcus faecium.

99. The method of claim 97, wherein the infection is caused by an Enterobacteriaceae species including Klebsiella pneumonia.

100. The method of claim 97, wherein the infection is caused by a bacterial species resistant to vancomycin or carbapenems.

101. The method of claim 97, wherein the infection is caused by a drug resistant or multi-drug resistant (MDROs) bacteria including a vancomycin-resistant Enterococcus spp. selected from Enterococcus faecalis and Enterococcus faecium, a carbapenem-resistant Enterobacteriaceae spp. selected from Klebsiella pneumonia, Klebsiella oxytoca, Klebsiella aerogenes, and Enterobacter spp., an extended spectrum beta-lactamase (ESBL) selected from E. coli and Klebsiella species, a methicillin-resistant Staphylococcus aureus (MRSA), or combinations thereof.

102. A method of treating and/or reducing the risk of graft-versus-host-disease (GvHD) in a subject in need thereof, comprising administering to the subject an effective amount of the composition of any one of claims 1 to 34 or the pharmaceutical formulation of any one of claims to 39.

103. The method of claim 102, wherein the GvHD comprises an acute graft versus host disease (aGvHD) or a chronic graft versus host disease (cGvHD).

104. A method of treating and/or reducing the risk of mucositis in a subject in need thereof, comprising administering to the subject an effective amount of the composition of any one of claims 1 to 34 or the pharmaceutical formulation of any one of claims 35 to 39.

105. The method of any one of claims 94 to 104, wherein the subject suffers from a cancer.

106. The method of claim 105, wherein the cancer comprises acute myeloid leukemia (AML), acute lymphoblastic leukemia (ALL), myelodysplastic syndromes (MDS), myeloproliferative neoplasms (MPN), or combinations thereof.

107. The method of any one of claims 40-106, wherein following administration of the composition or the pharmaceutical formulation, the composition or the pharmaceutical formulation increases frequency of Tregs and does not increase frequency of Th1 or Th17 effector T cells in the colon of the subject compared to a reference (e.g., a corresponding reference in a subject that did not receive the composition disclosed herein or corresponding reference in the subject prior to the administration of the composition).

108. The method of any one of claims 40-106, wherein following administration of the composition or the pharmaceutical formulation, the composition or the pharmaceutical formulation increases the ratio of Tregs to Th1 effector T cells or Tregs to Th17 effector T cells in the colon of the subject compared to a reference (e.g., a corresponding reference in a subject that did not receive the composition disclosed herein or corresponding reference in the subject prior to the administration of the composition).

109. The method of any one of claims 40-108, wherein the composition or the pharmaceutical formulation reduces the risk of one or more of: death, an immediate risk of death, a hospitalization, a prolongation of existing hospitalization, a significant disruption in the subject's ability to conduct normal life functions, an event associated with a pre-existing congenital anomaly or birth defect, or a need for medical or surgical intervention, in the subject compared to a reference (e.g., a corresponding reference in a subject that did not receive the composition or pharmaceutical formulation disclosed herein or corresponding reference in the subject prior to the administration of the composition or pharmaceutical formulation).

110. The method of claim 109, wherein the composition or pharmaceutical formulation reduces the risk of an invasive infection or a bloodstream infection in the subject compared to a subject that did not receive the composition or pharmaceutical formulation.

111. The method of claim 110, wherein the invasive infection or the bloodstream infection is one or more of bacterial meningitis, fungal meningitis, pleural empyema, pericardial empyema, hepatic abscess, splenic abscess, pulmonary abscess, urinary tract infection, or sterile site infection

112. The method of any one of claims 40-111, wherein following administration of the composition or the pharmaceutical formulation, one or more species of the composition or pharmaceutical formulation engrafts in the subject's gastrointestinal tract.

113. The method of claim 40-112, wherein the composition or the pharmaceutical formulation reduces the risk of one or more of:
a bloodstream infection,
a gastrointestinal infection,
acute GvHD, or
febrile neutropenia characterized by a body temperature of 38.0° C. and absolute neutrophil count less than 500 cells/mm 3 in the absence of an identified infectious agent,
in the subject compared to a subject that did not receive the composition or pharmaceutical formulation.

114. The method of claim 113, wherein the bloodstream infection is a bacterial infection or a fungal infection.

115. The method of claim 114, wherein the bacterial infection is VRE or CRE.

116. The method of claim 113, wherein the gastrointestinal infection is a bacterial infection, a viral infection, or a parasitic infection.

117. The method of claim 116, wherein the bacterial infection is of Clostridium difficile.

118. The method of claim 116, wherein the viral infection is of one or more of a norovirus, a rotavirus, or an adenovirus.

119. The method of claim 116, wherein the parasitic infection is of a Cryptosporidia species.

120. The method of any one of claims 113-119, wherein the composition or the pharmaceutical formulation reduces the risk of acute GvHD and gastrointestinal domination by one or more Enterococcus or Enterobacteriaceae species, or a combination thereof.

121. The method of any one of claims 113-119, wherein the composition or the pharmaceutical formulation reduces the risk of acute GvHD of severity Grade II, Grade III, or Grade IV.

122. The method of any one of claims 40-121, wherein following administration of the composition or the pharmaceutical formulation, the amount of a biomarker associated with one or more administered species is increased in the subject, or
a biomarker associated with acute GvHD is not detectable in the subject.

123. The method of claim 122, wherein the biomarker associated with one or more administered species is a urinary concentration of 3-indoxyl sulfate.

124. The method of claim 122 or claim 123, wherein the biomarker associated with acute GvHD is absent from the blood plasma of the subject, and is one or more of suppression of tumorigenicity 2 (ST2) or regenerating islet-derived 3α (REG3α).

125. The method of any one of claims 112-124, comprising a step of detecting that the one or more administered species have engrafted in the subject after administration of the composition or pharmaceutical composition.

126. The method of any one of claims 40-125, comprising a step of detecting the abundance of one or more of an Enterococcus species or an Enterobacteriaceae species after administration of the composition or pharmaceutical composition.

127. The method of claim 126, wherein the abundance of the one or more of an Enterococcus species or an Enterobacteriaceae species is decreased after administration of the composition or pharmaceutical composition.

128. The method of claim 127, wherein the one or more of an Enterococcus species or an Enterobacteriaceae species is a VRE species, a CRE species, or an ESBL species.

129. The method of any one of claims 125-128, wherein the one or more administered species or the one or more of an Enterococcus species or an Enterobacteriaceae species is detected in a stool of the subject prior to, after, or prior to and after administration of the composition or pharmaceutical composition.

130. The method of claim 129, wherein the one or more administered species or the one or more of an Enterococcus species or an Enterobacteriaceae species is detected in a stool of the subject by one or more steps comprising detecting the presence of a gene or genome of the one or more administered species or the one or more of an Enterococcus species or an Enterobacteriaceae species in a stool of the subject.

131. The method of claim 129 or 130, wherein the one or more administered species or the one or more of an Enterococcus species or an Enterobacteriaceae species is detected in a stool of the subject by one or more steps comprising cultivating the one or more administered species or the one or more of an Enterococcus species or an Enterobacteriaceae species from a stool of the subject.

132. The method of any one of claims 128-131, wherein administration of the composition or pharmaceutical composition reduces the risk of gastrointestinal domination in the subject by the one or more of an Enterococcus species or an Enterobacteriaceae species.

133. The method of any one of claims 40-132, wherein administration of the composition or pharmaceutical composition reduces one or more of:
the need for administration of one or more anti-infective agents to the subject,
the frequency of hospitalization of the subject,
the length of hospitalization of the subject, or
transplant-related mortality of the subject.

134. The method of any one of claims 113-133, wherein administration of the composition or pharmaceutical composition increases one or more of relapse-free survival of the subject and GvHD-free survival of the subject.

135. The method of any one of claims 113-134, wherein the gastrointestinal infection is determined with an enzyme immunoassay or a cell culture cytotoxicity neutralization assay.

The application's sequence listing, which the Patent Office published only in electronic form, follows.

SEQUENCE LISTING (352 sequences)

SEQ ID NO: 1 - DNA, 1346 bp, Artificial Sequence
  STR00005.1 Collinsella_aerofaciens_strain_JCM_10188_16S_ribosomal_RNA
acccctctccggagggaagcgagtggcgaacggctgagtaacacgtggagaacctgccccctcccccgggatagccgcccgaaaggacgggtaataccggataccccggggtgccgcatggcaccccggctaaagccccgacgggaggggatggctccgcggcccatcaggtagacggcggggtgacggcccaccgtgccgacaacgggtagccgggttgagagaccgaccggccagattgggactgagacacggcccagactcctacgggaggcagcagtggggaatcttgcgcaatggggggaaccctgacgcagcgacgccgcgtgcgggacggaggccttcgggtcgtaaaccgctttcagcagggaagagtcaagactgtacctgcagaagaagccccggctaactacgtgccagcagccgcggtaatacgtagggggcgagcgttatccggattcattgggcgtaaagcgcgcgtaggcggcccggcaggccgggggtcgaagcggggggctcaaccccccgaagcccccggaactccgcggcttgggtccggtaggggagggtggaacacccggtgtagcggtggaatgcgcagatatcgggtggaacaccggtggcgaaggcggccctctgggccgagaccgacgctgaggcgcgaaagctgggggagcgaacaggattagataccctggtagtcccagccgtaaacgatggacgctaggtgtggggggacgatccccccgtgccgcagccaacgcattaagcgtcccgcctggggagtacggccgcaaggctaaaactcaaaggaattgacgggggcccgcacaagcagcggaacatgtggcttaattcgaagcaacgcgaagaaccttaccagggcttgacgtatgggtgaagcgggggaaaccccgtggacgagaggagcccatacaggtggtgcatggctgtcgtcagctcgtgtcgcgagatgatgggttaagtcccgcaacgagcgcaacccccgccgcgtgttgccatcgggtgatgccgggaacccacgcgggaccgccgccgtcaaggcggaggagggcggggacgacgtcaagtcatcatgccccttatgccctgggctgcacacgtgctacaatggccggtacagagggatgccaccccgcgagggggagcggatcccggaaagccggccccagttcggattgggggctgcaacccgcccccatgaagtcggagttgctagtaatcgcggatcagcatgccgcggtgaatgcgttcccgggccttgtacacaccgcccgtcacaccacccgagtcgtctgcacccgaagtcgccggcccaaccgaga

SEQ ID NO: 2 - DNA, 1308 bp, Artificial Sequence
  STR00003.1 Collinsella_aerofaciens_strain_JCM_10188_16S_ribosomal_RNA
  misc_feature (1263)..(1269): n is a, c, g, or t
gtatccaacctgccgatgactcggggatagcctttcgaaagaaagattaatacccgatggcataattcttccgcatggtagaattattaaagaatttcggtcatcgatggggatgcgttccattaggttgttggcggggtaacggcccaccaagccttcgatggataggggttctgagaggaaggtcccccacattggaactgagacacggtccaaactcctacgggaggcagcagtgaggaatattggtcaatggacgagagtctgaaccagccaagtagcgtgaaggatgactgccctatgggttgtaaacttcttttatacgggaataaagtgaggcacgtgtgcctttttgtagtaccgtatgaataaggatcggctaactccgtgccagcagccgcggtaatacggaggatccgagcgttatccggatttattgggtttaaagggagcgtaggcggacgcttaagtcagttgtgaaagtttgcggctcaaccgtaaaattgcagttgatactgggtgtcttgagtacagtagaggcaggcggaattcgtggtgtagcggtgaaatgcttagatatcacgaagaactccgattgcgaaggcagcctgctggactgtaactgacgctgatgctcgaaagtgtgggtatcaacaggattagataccctggtagtccactcagtaaacgatgaatactcgctgtttgcgatatacagtaagcggccaagcgaaagcgttaagtattcctcctggggagtacgccggcaacggtgaaactcaaaggaattgacgggggcccgcacaagcggaggaacttgtggtttaattcgatgatacgcgaggaaccttacccgggattgaattgcaactgaatgaggtggagacctgtcaactgcatggcagttgtgaagatgctgcatggtgaaggccagctcgtgccgtgaggtgtcggcttaagtgccataacgagcgcaacccttatcgatagttaccatcaggttatgctggggactctgtcgagactgccgtcgtaagatgtgaggaaggtggggatgacgtcaaatcagcacggcccttacgtccggggctacacacgtgttacaatggggggtacagaaggcagctacacggtgacgtgatgctaatccctaaagcctctctcagttcggattggagtctgcaacccgactccatgaagctggattcgctagtaatcgcgcatcagccacggcgcggtgaatacgttcccgggccttgtacnnnnnnnccgtcaagccatgaaagccgggggtacctgaagtgcgta

SEQ ID NO: 3 - DNA, 1349 bp, Artificial Sequence
  STR00044.1 Collinsella_aerofaciens_strain_JCM_10188_16S_ribosomal_RNA
  misc_feature (20)..(20): n is a, c, g, or t
  misc_feature (39)..(41): n is a, c, g, or t
tgatttcctatttgagtggngggcggacgggtgagtaannngtgggtaacctgcctcatacagggggataacagttagaaatgactgctaataccgcataagaccacagcaccgcatggtgcaggggtaaaaactccggtggtatgagatggacccgcgtctgattagttagttggtggggtaacggcctaccaaggcgacgatcagtagccgacctgagagggtgaccggccacattgggactgagacacggcccaaactcctacgggaggcagcagtggggaatattgcacaatgggggaaaccctgatgcagcgacgccgcgtgagcgaagaagtatttcggtatgtaaagctctatcagcagggaagaaaatgacggtacctgactaagaagccccggctaactacgtgccagcagccgcggtaatacgtagggggcaagcgttatccggatttactgggtgtaaagggagcgtagacggagcagcaagtctgatgtgaaaacccggggctcaaccccgggactgcattggaaactgttgatctggagtgccggagaggtaagcggaattcctagtgtagcggtgaaatgcgtagatattaggaggaacaccagtggcgaaggcggcttactggacggtaactgacgttgaggctcgaaagcgtggggagcaaacaggattagataccctggtagtccacgccgtaaacgatgactactaggtgtcgggtggcaaagccattcggtgccgcagccaacgcaataagtagtccacctggggagtacgttcgcaagaatgaaactcaaaggaattgacggggacccgcacaagcggtggagcatgtggtttaattcgaagcaacgcgaagaaccttacctgctcttgacatcccggtgacagcagagtaatgtctgcttttcttcggaacaccggtgacaggcggagcatggtggtcgtcagctcgtgtcgtgagatgtaggggtaacacccgcaacgagcgcaacccctatcttcagtagccagcggtaaggccgggcactctggagagactgccagggataacctggaggaaggtggggatgacgtcaaatcatcatgccccttatgagcagggctacacacgtgctacaatggcgtaaacaaagggaagcgaacccgcgagggtgggcaaatcccaaaaataacgtctcagttcggattgtagtctgcaactcgactacatgaagctggaatcgctagtaatcgcgaatcagaatgtcgcggtgaatacgttcccgggtcttgtacacaccgcccgtcacaccatgggagtcagtaacgcccgaagtcagtgacccaaccgtaa

SEQ ID NO: 4 - DNA, 1362 bp, Artificial Sequence
  STR00043.1 Collinsella_aerofaciens_strain_JCM_10188_16S_ribosomal_RNA
  misc_feature (750)..(754): n is a, c, g, or t
ttattgaaacttcggtcgatttaatttaattctagtggcggacgggtgagtaacgcgtgggtaacctgccttatacagggggataacagtcagaaatggctgctaataccgcataagcgcacagagctgcatggctcagtgtgaaaaactccggtggtataagatggacccgcgttggattagcttgttggtggggtaacggcccaccaaggcgacgatccatagccggcctgagagggtgaacggccacattgggactgagacacggcccagactcctacgggaggcagcagtggggaatattgcacaatgggggaaaccctgatgcagcgacgccgcgtgaaggaagaagtatctcggtatgtaaacttctatcagcagggaaatagacggtacctgactaaaagccccggctaactacgtgccagcagccgcggtaatacgtagggggcaagcgttatccggatttactgggtgtaaagggagcgtagacggtgtggcaagtctgatgtgaaaggcatgggctcaacctgtggactgcattggaaactgtcatacttgagtgccggaggggtaagcggaattcctagtgtagcggtgaaatgcgtagatattaggaggaacaccagtggcgaaggcggcttactggacggtaactgacgttgaggctcgaaagcgtggggagcaaacaggattagataccctggtagtccacgccgtaaacgatgaatactaggtgtcggggagcannnnngttcggtgccgtcgcaaacgcagtaagtattccacctggggagtacgttcgcaagaatgaaactcaaaggaattgacggggagccgcacaagcggtggagcatgtggtttaattcgaagcaacgcgaagaaccttaccaactcttgacatccctggaaactgtcatacttgagtgccggtgtggtaagcggaattcatagtgtaggggtgaacatggtagacgtcagtcgtgagatgttgggttaagtcccgcaacgagcgcaacccctatcctcagtagccagcatttaaggtgggcactctggggagactgccagggataacctggaggaaggcggggatgacgtcaaatcatcatgccccttatgatttgggctacacacgtgctacaatggcgtaaacaaagggaagcgagattgtgagatggagcaaatcccaaaaataacgtcccagttcggactgtagtctgcaacccgactacacgaagctggaatcgctagtaatcgcggatcagaatgccgcggtgaatacgttcccgggtcttgtacacaccgcccgtcacaccatgggagtcagtaacgcccgaagtcagtgacctaactgcaaag

SEQ ID NO: 5 - DNA, 1322 bp, Artificial Sequence
  STR00053 Collinsella_aerofaciens_strain_JCM_10188_16S_ribosomal_RNA
  misc_feature (15)..(16): n is a, c, g, or t
  misc_feature (22)..(22): n is a, c, g, or t
  misc_feature (46)..(54): n is a, c, g, or t
  misc_feature (56)..(56): n is a, c, g, or t
  misc_feature (271)..(271): n is a, c, g, or t
  misc_feature (1283)..(1284): n is a, c, g, or t
  misc_feature (1286)..(1286): n is a, c, g, or t
gaacgggatccatcnngcttgnttggtggtgagagtggcgaacggnnnnnnnnngngtgaccgacctgccccatacaccggaataactcctggaaacgggtggtaatgccggatgctccagttgatcgcatggtcttctgggaaagctttcgcggtatgggatggggtcgcgtcctatcagcttgacggcggggtaacggcccaccgtggcttcgacgggtagccggcctgagagggcgaccggccacattgggactgaaatacggcccanactcctacgggaggcagcagtggggaatattgcacaatgggcgcaagcctgatgcagcgacgccgcgtgagggatggaggccttcgggttgtaaacctcttttatcggggagcaagcgagagtgagtttacccgttgaataagcaccggctaactacgtgccagcagccgcggtaatacgtagggtgcaagcgttcggattggcaaagggctcgtaggggttcgtcgctccggtgtgaaagtccatcgcttaacggtggatcgcgccgggtacgggcgggcttgagtgcggtaggggagactggaattcccggtgtaacggtggaatgtgtagatatcgggaagaacaccaatggcgaagcaggtcttgggccgttactgacgctgagagcgaaagcgtggggagcgaacaggattaataccctggtagtccacgccgtaaacggggagctggatgtggggcccgttccacgggttccgtgtcgagctacgcgttaacatcccgcctgggggcgaaactcaaaatgggggcccgcacaagcggcggagcatgcggattaattcgatgcaacgcgaagaaccttacctgggcttgacatgttcccgacggtcgtagagatacggcttcccttcggggcgggttcacaggtggtgcatggtcgtcgtcagctcgtgtcgtgagatgttgggttaagtcccgcaacgagcgcaaccctcgccccgtgttgccagcggattatgccgggaactcacgggggaccgccggggttaactcggaggaaggtggggatgacgtcagatcatcatgccccttacgtccagggcttcacgcatgctacaatggccggtacaacgggatgcgacgcggcgacgcggagcggatccctgaaaaccggtctcagttcggatcgcagtctgcaactcgactgcgtgaaggcggagtcgctagtaatcgcgaatcagcaacgtcgcggtgaatgcgttcccgggccttgtacacaccgcccgtcaanncntgaaagtgggcagcacccgaagccggtggcctaacc

SEQ ID NO: 6 - DNA, 1378 bp, Artificial Sequence
  STR00059.1 Collinsella_aerofaciens_strain_JCM_10188_16S_ribosomal_RNA
  misc_feature (18)..(18): n is a, c, g, or t
tcgaggggcagcgcgggnagtagcaatacatctcgccggcgaccggcgcacgggtgagtaacacgtgtgcaaccaaccccgtaccgggagataacccgcggaaacgtggactaacatcccataagactctagagccgcatggctctggatttaaaattccggtggtacgggacgggcacgcgcgacattaggtagttggcggggtaacggcccaccaagccgacgatgtctaggggttctgagaggaaggtcccccacactggaactgagacacggtccagactcctacgggaggcagcagtgaggaatattggtcaatgggcgagagcctgaaccagccaagtcgcgtgagggaagaatggtctatggcctgtaaacctcttttgtcaaggaagaataaaaggtacgtgtaccttcttgccagtacttgacgaataagcatcggctaactccgtgccagcagccgcggtaatacgggggagagcgttatccggatttattgggtttaaagggcgcgtaggcgggacgccaatcagcggtaaaagactgcagtaaactgtagcacgccgttgaaactggcgacctcgagacgagacgagggaggcggaacaagtgaagtagcggtgaaatgcttagatatcacttggaaccccgatagcgaaggcagcttcccaggctcgatctgacgctgatgcgcgagagcgtgggtagcgaacaggattagataccctggtagtccacgccgtaaacgatgctcactggatcttggcgatacactgccagggttcaagcgaaagtattaagtgagccacctggggagtacgtcggcaacgatgaaactcaaaggaattgacgggggcccgcacaagcggaggaacatgtggtttaattcgatgatacgcgaggaaccttacccgggtttaaatgtattttgcatttcttggaaacaggaattcccttcggggctagatacaaggtgctgcatggttgtcgtcagctcgtgccgtgaggtgtcgggttaagtcccataacgagcgcaacccctatcgccagttgccagcggctgaggccgggcactctgtcgagactgccaccgtaaggtgcgaggaaggcggggatgacgtcaaatcagcacggcccttacacccggggcgacacacgtgttacaatggccggtacagagggcagccacggggtgacccggagcgaatctctaaagccggtcgtagttcggactggagtctgcaacccgactccacgaagttggattcgctagtaatcgcgcatcagccatggcgcggtgaatacgttcccgggccttgtacacaccgcccgtcaagccatggaagccgggagtacctgaagatcgtgaccgcga

SEQ ID NO: 7 - DNA, 1367 bp, Artificial Sequence
  STR00060.1 Collinsella_aerofaciens_strain_JCM_10188_16S_ribosomal_RNA
  misc_feature (41)..(42): n is a, c, g, or t
agcaatgctcgagtggcgaacgggtgagtaatacataagtnncctgccctagacagggggataactgctggaaacggcagctaagaccgcataggtatggacactgcatggtgaccatattaaaagtgccaaggcactggtagaggatggacttatggcgcattagctggttggtgaggtaacggctcaccaaggcgacgatgcgtagccgacctgagagggtgaccggccacactgggactgagacacggcccagactcctacgggaggcagcagtagggaattttcggcaatggggggaaccctgaccgagcaacgccgcgtgaaggaagaaggaattcgttctgtaaacttctgttataaaggaagaacggcggatatagggaatgatatccgagtgacggtactttatgagaaagccacggctaactacgtgccagcagccgcggtaatacgtaggtggcgagcgttatccggaattattgggcgtaaagagggagcaggcggcggcagaggtctgtggtgaaagactgaagcttaacttcagtaagccatagaaaccgggctgctagagtgcaggagaggatcgtggaattccatgtgtagcggtgaaatgcgtagatatatggaggaacaccagtggcgaaggcgacggtctggcctgtaactgacgctcattcccgaaagcgtggggagcaaataggattagataccctagtagtccacgccgtaaacgatgagtactaagtgttgggagtcaaatttcagtgctgcagttaacgcaataagtactccgcctgagtagtacgttcgcaagaatgaaactcaaaggaattgacgggggcccgcacaagcggtggagcatgtggtttaattcgaagcaacgcgaagagcgttaccaggtcttgacatccggatgaagacctcataaatgagggcttcagtaagccatagaaaccgggctgctggagtccagcagctcgtgtcgtgagatgttgggttaagtcccgcaacgagcgcaacccttgtcgctagttaccatcattaagttggggactctagcgagactgccagtgacaagctggaggaaggcggggatgacgtcaaatcatcatgccccttatgacctgggctacacacgtgctacaatggatggagcagagggaagcgaagccgcgaggtgaagcaaaacccataaaaccattctcagttcggattgtagtctgcaactcgactacatgaagttggaatcgctagtaatcgcgaatcagcatgtcgcggtgaatacgttctcgggccttgtacacaccgcccgtcacaccatgagagttgataacacccgaagccggtggcctaaccgcaaggag

SEQ ID NO: 8 - DNA, 1379 bp, Artificial Sequence
  STR00061.1 Collinsella_aerofaciens_strain_JCM_10188_16S_ribosomal_RNA
ggggcatcagtttggtttgcttgcaaaccaaagctggcgaccggcgcacgggtgagtaacacgtatccaacctgcctcatactcggggatagcctttcgaaagaaagattaatatccgatagcatatatttcccgcatgggttttatattaaagaaattcggtatgagatggggatgcgttccattagtttgttggcggggtaacggcccaccaagactacgatggataggggttctgagaggaaggtcccccacattggaactgagacacggtccaaactcctacgggaggcagcagtgaggaatattggtcaatggacgcgagtctgaaccagccaagtagcgtgaaggatgactgccctatgggttgtaaacttcttttatatgggaataaagtggtccacgtgtggatttttgtatgtaccatatgaataaggatcggctaactccgtgccagcagccgcggtaatacggaggatccgagcgttatccggatttattgggtttaaagggagcgtaggcggattgttaagtcagttgtgaaagtttgcggctcaaccgtaaaattgcagttgatactggcagtcttgagtgcagtagaggtgggcggaattcgtggtgtagcggtgaaatgcttagatatcacgaagaactccgattgcgaaggcagctcactggagtgtaactgacgctgatgctcgaaagtgtgggtatcaaacaggattagataccctggtagtccacacagtaaacgatgaatactcgctgtttgcgatatacagtaagcggccaagcgaaagcattaagtattccacctggggagtacgccggcaacggtgaaactcaaaggaattgacgggggcccgcacaagcggaggaacatgtggtttaattcgatgatacgcgaggaaccttacccgggcttaaattgcaaaggaatcgtgggcaaaccgttaagccgcaaggcatttgtgaaggtgctgcatggttgtcgtcagctcgtgccgtgaggtgtcggcttaagtgccataacgagcgcaacccttatcttcagttactaacaggtcatgctgaggactctggagagactgccgtcgtaagatgtgaggaaggtggggatgacgtcaaatcagcacggcccttacgtccggggctacacacgtgttacaatggggggtacagaaggccgctacctggtgacaggatgccaatcccaaaaacctctctcagttcggatcgaagtctgcaacccgacttcgtgaagctggattcgctagtaatcgcgcatcagccatggcgcggtgaatacgttcccgggccttgtacacaccgcccgtcaagccatgaaagccgggggtacctgaagtacgtaaccgcaa

SEQ ID NO: 9 - DNA, 1169 bp, Artificial Sequence
  STR00062.1 Collinsella_aerofaciens_strain_JCM_10188_16S_ribosomal_RNA
  misc_feature (8)..(8): n is a, c, g, or t
  misc_feature (11)..(11): n is a, c, g, or t
  misc_feature (19)..(19): n is a, c, g, or t
  misc_feature (29)..(29): n is a, c, g, or t
ccaaggcngcnatacatantgggagtganaggttagccgcccgcgttggtactgagacacggaccaaacttatacgggaggcagcagtgaggaatattggtcaatggacgcaagtctgaaccagccatgccgcgtgcaggaagacggctctatgagttgtaaactgcttttgtactagggtaaacgctcctacgtgtaggagcctgaaagtatagtacgaataaggatcggctaactccgtgccagcagccgcggtaatacggaggatccaagcgttatccggatttattgggtttaaagggtgcgtaggcggtttgataagttagaggtgaaataccggggctcaactccggaactgcctctaatactgttgaactagagagtagttgcggtaggcggaatgtatggtgtagcggtgaaatgcttagagatcatacagaacaccgattgcgaaggcagcttaccaaactatatctgacgttgaggcacgaaagcgtggggagcaaacaggattagataccctggtagtccacgcagtaaacgatgataactcgttgtcggcgatacacagtcggtgactaagcgaaagcgataagttatccacctggggagtacgttcgcaagaatgaaactcaaaggaattgacgggggaccgcacaagcggaggaacatgtggtttaattctatgatacgcgaggaagcttacgcgggcttgaaagttagtgacgattctggaaacaccattcccttaagggtgatgaaactaggtgctgcatggttgtcgtcagctcgtgccgtgaggtgtcgggttaagtcccataacgagcgcaacccctaccgttagttgccatcaggtcaagctgggcactctggcgggactgccggtgtaagccgagaggaaggtggggatgacgtcaaatcagcacggcccttacgtccggggctacacacgtgttacaatggtaggtacagagggccgctaccccgcgaggggatgccaatctcgaaagcctatctcagttcggatcggaggctgaaacccgcctccgtgaagttggattcgctagtaatcgcgcatcagccatggcgcggtgaatacgttcccgggccttgtacacaccgcccgtcaagccatggaagctgggggtgcctgaagttcgtgaccgcaa

SEQ ID NO: 10 - DNA, 1367 bp, Artificial Sequence
  STR00066.1 Collinsella_aerofaciens_strain_JCM_10188_16S_ribosomal_RNA
  misc_feature (36)..(36): n is a, c, g, or t
  misc_feature (40)..(41): n is a, c, g, or t
  misc_feature (1317)..(1317): n is a, c, g, or t
atgaggattccttcgggatgaagcatttgtgacttngtgnnggacgggtgagtaacgcgtgggtaacctgccttatacagggggataacagttagaaatgactgctaataccgcataagcgcacagtctcgcatgggacagtgtgaaaaactatggtggtataagatggacccgcgtctgattagctagttggtggggtaaaggcctaccaaggcgacgatcagtagccgacctgagagggtgatcggccacattgggactgagacacggcccaaactcctacgggaggcagcagtggggaatattgcacaatgggggaaaccctgatgcagcaacgccgcgtgaaggaagaagtatctcggtatgtaaacttctatcagcagggaagaaaatgacggtacctgactaagaagctccggctaaatacgtgccagcagccgcggtaatacgtatggagcaagcgttatccggatttactgggtgtaaagggagcgtaggcggttatgcaagtcagatgtgaaagcccggggcttaaccccgggactgcatttgaaactgtgtaactagagtgtcggagaggtaagtggaattcctagtgtagcggtgaaatgcgtagatattaggaggaacaccagtggcgaaggcggcttactggacgataactgacgctgaggctcgaaagcgtggggagcaaacaggattagataccctggtagtccacgccgtaaacgatgaatactaggtgttggggagcaaagctcttcggtgccgcagcaaacgcaataagtattccacctggggagtacgttcgcaagaatgaaactcaaaggaattgacggggacccgcacaagcggtggagcatgtggtttaattcgaagcaacgcgaagaaccttaccaagtcttgacatctggatgaccggtccgtaatgggaccttcccttcggggcatccaagacaggtggtgcatggttgtcgtcagctcgtgtcgtgagatgttgggttaagtcccgcaacgagcgcaacccttatccttagtagccagcagtaagatgggcactctagggagactgccggagacaatccggaggaaggtggggatgacgtcaaatcatcatgccccttatgacttgggctacacacgtgctacaatggcgtaaacaaagggaagcgagaccgcgaggttaagcaaatctcaaaaataacgtctcagttcggattgtagtctgcaactcgactacatgaagctggaatcgctagtaatcgcgaatcagcatgtcgcggtgaatacgttcccgggtcttgtacacaccgcccntcacaccatgggagtcgataacgcccgaagccggtgactcaaccgaaagg

SEQ ID NO: 11 - DNA, 1346 bp, Artificial Sequence
  STR00067.1 Collinsella_aerofaciens_strain_JCM_10188_16S_ribosomal_RNA
  misc_feature (47)..(47): n is a, c, g, or t
  misc_feature (1205)..(1205): n is a, c, g, or t
  misc_feature (1256)..(1256): n is a, c, g, or t
  misc_feature (1325)..(1330): n is a, c, g, or t
gcacccctgacggagttttcggacaacgaaagggaatgcttagtggnggacgggtgagtaacgcgtgagtaacctgccttggagtggggaataacagccggaaacggctgctaataccgcatgatgtatctggatcgcatggttctggataccaaagatttatcgctctgagatggactcgcgtctgattagctagttggtgaggtaacggctcaccaaggcgacgatcagtagccggactgagaggttggccggccacattgggactgagacacggcccagactcctacgggaggcagcagtggggaatattgggcaatgggcgaaagcctgacccagcaacgccgcgtgaaggaagaaggccctcgggttgtaaacttcttttgtcagggacgaagcaagtgacggtacctgacgaataagccacggctaactacgtgccagcagccgcggtaatacgtaggtggcaagcgttatccggatttactgggtgtaaagggcgtgtaggcgggagtgcaagtcagatgtgaaaactatgggctcaacccatagcctgcatttgaaactgtacttcttgagtgatggagaggcaggcggaattccctgtgtagcggtgaaatgcgtagatatagggaggaacaccagtggcgaaggcggcctgctggacattaactgacgctgaggcgcgaaagcgtggggagcaaacaggattagataccctggtagtccacgccgtaaacgatggatactaggtgtggggggtctgaccccctccgtgccgcagttaacacaataagtatcccacctggggagtacgatcgcaaggttgaaactcaaaggaattgacgggggcccgcacaagcggtggagtatgtggtttaattcgaagcaacgcgaagaaacttaccgggacttgacatcctactaacgaagcagagatgcataagtttccattcggggaaagtagagacaggtggtgcatggttgtcgtcagctcgtgtcgtgagatgttgggttaagtcccgcaacgagcgcaacccttattgttagttgctacgcaagagcactctagcgagactgccgttgacaaaacggaggaaggtggggacgacgtcaaatcatcatgccccttatgtcctgggccacacacgtactacaatggcggtcaacagagggaagcaaagccgcgaggtggagcaaatccntaaaagccgtcccagttcggattgcaggctgaaactcgcctgtatgaagtnggaatcgctagtaatcgcggatcagcatgccgcggtgaatacgttcccgggccttgtacacaccgcccnnnnnnccatgagagtcgggaa

SEQ ID NO: 12 - DNA, 1328 bp, Artificial Sequence
  STR00065 Collinsella_aerofaciens_strain_JCM_10188_16S_ribosomal_RNA
  misc_feature (21)..(21): n is a, c, g, or t
tcgagcgatgcgctgttttcngaatcttcggaggaagaggacagtgactgagcggcggacgggtgagtaacgcgtgggcaacctgcctcatacagggggataacagttagaaatgactgctaataccgcataagcgcacaggaccgcatggtgtagtgtgaaaaactccggtggtatgagatggacccgcgtctgattaggtagttggtggggtaaaggcctaccaagccgacgatcagtagccgacctgagagggtgaccggccacattgggactgagacacggcccaaactcctacgggaggcagcagtggggaatattgcacaatgggggaaaccctgatgcagcgacgccgcgtgaaggaagaagtatttcggtatgtaaacttctatcagcagggaagaagatgacggtacctgagtaagaagcaccggctaatactgccgcccgcggaattgggacttatccggatttactgggtgtaaagggagcgtaacggataggcaagttggagtgaaaacccagggctcaaccctgggactgctttggaaactgcagatctggagtgccggagaggtaagcggaattctagtgtacggtgaaatgcgtaatattagaggaacaccatggcgaaggcggcttctggacggtgactgacgttgaggctcgaaagcgtggggagcaaacaggattaataccctggtagtccacgccgtaacgatgactactaggtgtcggtgtgcaaagcacatcggtgccgcacaacgcataagtagtccacctgggagtacgttcgcaagagaaagatgggccaggaaacgtgctttaattcgaagcaacgcgaagaaccttacctggtcttgacatccggatgacgggcgagtaatgtcgccgtcccttcggggcatccgagacaggtggtgcatggttgtcgtcagctcgtgtcgtgagatgttgggttaagtcccgcaacgagcgcaacccttatcttcagtagccagcatataaggtgggcactctggagagactgccagggagaacctggaggaaggtggggatgacgtcaaatcatcatgccccttatggccagggctacacacgtgctacaatggcgtaaacaaagggaagcgagagggtgacctggagcgaatcccaaaaataacgtttcagttcggattgtagtctgcaactcgactacatgaagctggaatcgctagtaatcgcggatcagcatgccgcggtgaatacgttcccgggtcttgtacaccccccccgtcacaccatgggagtcagtaacgcccgaagccagtgacccaaccttagaggag

SEQ ID NO: 13 - DNA, 1342 bp, Artificial Sequence
  STR00069 Collinsella_aerofaciens_strain_JCM_10188_16S_ribosomal_RNA
cggattgaaagagtgttgcgactgagcggcggacgggtgagtaacgcgtgggtaacctgcctcatacagggggataacagttagaaatgactgctaataccgtataagaccacggtgccgcatggcacagtggtaaaaactccggtggtatgagatggacccgcgtctgattagctagttggtagggtaacggcttaccaaggcgacgatcagtagccgacctgagagggtgaccggccacattgggactgagacacggcccaaactcctacgggaggcagcagtggggaatattgcacaatgggggaaaccctgatgcagcgacgccgcgtgaaggatgaagtatttcggtatgtaaacttctatcagcagggaagaaaatgacggtacctgactaagaagccccggctaactacgtgccagcagccgcggtaatacgggggagcgcggatttactgggtgtaaagggagcgtagacggtgatgcaagttgatgtgaaaacccggggctcaaccccgggactgcattggaaactgtgtgactagagtgtcggagaggtaagtggaattcctagtgtagcggtgaaatgcgtagatattaggaggaacaccagtggcgaaggcggcttactggacgatgactgacgttgaggctcgaaagcgtggggagcaaacaggattagataccctggtagtccacgccgtaaacgatgaatactaggtgtcgggtggcaaagccattcggtgccgcagcaaacgcagtaagtattccacctggggagtacgttcgcaagaatgaaactcaaaggaattgacggggacccgcacaagcggtggagcatgtggtttaattcgaagcaacgcgaagaaccttacctgctcttgacatcccgctgagctgtcaaggaagcggacatgccgttgggggtgtggagacaggtggtgcatggttgtcgtcagctcgtgtcgtgagatgttgggttaagtcccgcaacgagcgcaacccttatctttagtagccagcggtcaggccgggcactctagagagactgccagggataacctggaggaaggtggggatgacgtcaaatcatcatgccccttatgagcagggctacacacgtgctacaatggcgtaaacaaagggaggcaatactgtgaagtggagcaaatcccaaaaataacgtctcagttcggattgtagtctgcaactcgactacatgaagctggaatcgctagtaatcgcgaatcagaatgtcgcggtgaatacgttcccgggtcttgtacacaccgcccgtcacaccatgggagttggtaacgcccgaagtcagtgacccaaccgc

SEQ ID NO: 14 - DNA, 1342 bp, Artificial Sequence
  STR00068.1 Collinsella_aerofaciens_strain_JCM_10188_16S_ribosomal_RNA
  misc_feature (16)..(16): n is a, c, g, or t
  misc_feature (18)..(19): n is a, c, g, or t
  misc_feature (42)..(42): n is a, c, g, or t
  misc_feature (60)..(60): n is a, c, g, or t
ccggcgcacgggtggntnncgcgtatgcaagttgcctatcanagggggataacccggcgnaagtcggacgaataccgcgtgaagcaggggccccgcatggggatatttgctaaagattcatcgctgatagataggcatgcgttccattaggcagttggcggggtaacggcccaccaaaccgacgatggataggggttctgagaggaaggtcccccacattggtactgagacacggaccaaactcctacgggaggcagcagtgaggaatattggtcaatgggcgtaagcctgaaccagccaagtcgcgtgagggatgaaggttctatggatcgtaaacctcttttataagggaataaagtgcgggacgtgtcccgttttgtatgtaccttatgaataaggatcggctaactccgtgccagcagccgcggtaatacggaggtccgagcgttatccggatttattgggtttaaagggtgcgtaggcggccttttaagtcagcggtgaaagtctgtggctcaaccatagaattgccgttgaaactgggaggcttgagtatgtttgaggcaggcggaatgcgtggtgtagcggtgaaatgcttagatatcacgcagaaccccgattgcgaaggcagcctgccaagccatgactgacgctgatgcacgaaagcgtggggatcaaacaggattagataccctggtagtccacgcagtaaacgatgatcactagctgtttgcgatacacagtaagcggcacagcgaaagcgttaagtgatccacctggggagtacgccggcaacggtgaaactcaaaggaattgacgggggcccgcacaagcggaggaacatgtggtttaattcgatgatacgcgaggaaccttacccgggtttgaacgcattcggactcagctggaaacatctttggttcaaccatagaattgcgggtggaactgggaggcttgagtactcgtgccgtgaggtgtcggcttaagtgccataacgagcgcaacccttgccactagttactaacaggtgatgctgaggactctggtgggactgccagcgtaagctgcgaggaaggcggggatgacgtcaaatcagcacggcccttacatccggggcgacacacgtgttacaatggcgtggacaaagggaagccacctggcgacagggagcgaatccccaaaccacgtctcagttcggatcggagtctgcaacccgactccgtgaagctggattcgctagtaatcgcgcatcagccatggcgcggtgaatacgttcccgggccttgtacacaccgcccgtcaagccatgggagccgggggtacctgaagtccgtaaccgcga

SEQ ID NO: 15 - DNA, 1379 bp, Artificial Sequence
  STR00070.1 Collinsella_aerofaciens_strain_JCM_10188_16S_ribosomal_RNA
  misc_feature (1323)..(1323): n is a, c, g, or t
cacccttgactgaggtttcggccaaatgataggaatgcttagtggcggactggtgagtaacgcgtgaggaacctaccttccagagggggacaacagttggaaacgactgctaataccgcatgacgcatgaccggggcatcccgggcatgtcaaagattttatcgctggaagatggcctcgcgtctgattagctagatggtggggtaacggcccaccatggcgacgatcagtagccggactgagaggttgaccggccacattgggactgagatacggcccagactcctacgggaggcagcagtggggaatattgggcaatggacgcaagtctgacccagcaacgccgcgtgaaggaagaaggctttcgggttgtaaacttcttttgtcagggaagagtagaagacggtacctgacgaataagccacggctaactacgtgccagcagccgcggtaatacgtaggtggcaagcgttgtccggatttactgggtgtaaagggcgtgcagccgggccggcaagtcagatgtgaaatctggaggcttaacctccaaactgcatttgaaactgtaggtcttgagtaccggagaggttatcggaattccttgtgtagcggtgaaatgcgtagatataaggaagaacaccagtggcgaaggcggataactggacggcaactgacggtgaggcgcgaaagcgtggggagcaaacaggattagataccctggtagtccacgctgtaaacgatggatactaggtgtgcggggactgaccccctgcgtgccgcagttaacacaataagtatcccacctggggagtacgatcgcaaggttgaaactcaaaggaattgacgggggcccgcacaagcggtggattatgtggtttaattcgaagcaacgcgaagaagcttaccagggcttgacatcctactaacgaagtagagatacatcgggggctcttcggggaaagtaaagacaggtggtgcatggttgtcgtcagctcgtgtcgtgagatgttgggttaagtcccgcaacgagcgcaacccctattgttagttgctacgcaagagcactctagcgagactgccgttgacaaaacggaggaaggtggggacgacgtcaaatcatcatgccccttatgtcctgggctacacacgtaatacaatggcggtcaacagagggaggcaaagccgcgaggcagagcaaacccccaaaagccgtcccagttcggatcgcaggctgcaacccgcctgcgtgaagtcggaatcgctagtaatcgcggatcagcatgccgcggtgaatacgttcccgggccttgtacacaccgcccntcacaccatgagagtcgggaacacccgaagtccgtagcctaaccgcaaggagggcg

SEQ ID NO: 16 - DNA, 1368 bp, Artificial Sequence
  STR00071.1 Collinsella_aerofaciens_strain_JCM_10188_16S_ribosomal_RNA
tcgaacgagagaattgctagcttgctaataattctctagtggcgcacgggtgagtaacacgtgagtaacctgcccccgagagcgggatagccctgggaaactgggattaataccgcatagtatcgaaagattaaagcagcaatgcgcttggggatgggctcgcggcctattagttagttggtgaggtaacggctcaccaaggcgatgacgggtagccggtctgagaggatgtccggccacactggaactgagacacggtccagacacctacgggtggcagcagtcgagaatcattcacaatgggggaaaccctgatggtgcgacgccgcgtgggggaatgaaggtcttcggattgtaaacccctgtcatgtgggagcaaattaaaaagatagtacccaagaggaagagacggctaactctgtgccagcagccgcggtaatacagaggtctcaagcgttgttcggaatcactgggcgtaaagcgtgcgtaggctgtttcgtaagtcgtgtgtgaaaggcgcgggctcaacccgcggacggcacatgatactgcgagactagagtaatggagggggaaccggaattctcggtgtagcagtgaaatgcgtagatatcgagaggaacactcgtggcgaaggcgggttcctggacattaactgacgctgaggcacgaaggccaggggagcgaaagggattagatacccctgtagtcctggcagtaaacggtgcacgcttggtgtgcggggaatcgaccccctgcgtgccggagctaacgcgttaagcgtgccgcctggggagtacggtcgcaagattaaaactcaaagaaattgacggggacccgcacaagcggtggagtatgtggcttaattcgatgcaacgcgaagaaccttacctgggcttgacatgtaatgaacaacatgtgaaagcatgcgactcttcggaggcgttacacaggtgctgcatggcggtcgtcagctcatgtcctgagatgtttggttaagtccagcaacgagcgcaacccctgttgccagttaccagcacgtgaaggtggggactctggcgagactgcccagatcaactgggaggaaggtggggacgacgtcaggtcagtatggcccttatgcccagggctgcacacgtactacaatgcccagtacagagggggccgaagccgcgaggcggaggaaatcctgaaaactgggcccagttcggactgtaggctgcaacccgcctacacgaagccggaatcgctagtaatggcgcatcagctacggcgccgtgaatacgttcccgggtcttgtacacaccgcccgtcacatcatggaagccggtcgcacccgaagtatctgaagccaaccgcaaggaggca

SEQ ID NO: 17 - DNA, 1298 bp, Artificial Sequence
  STR00007.1 Collinsella_aerofaciens_strain_JCM_10188_16S_ribosomal_RNA
  misc_feature (610)..(610): n is a, c, g, or t
ccgataactccgggatagcctttcgaaagaaagattaataccggatggcatacgaatatcgcatgatatttttattaaagaatttcggttatcgatggggatgcgttccattagtttgttggcggggtaacggcccaccaagactacgatggataggggttctgagaggaaggtcccccacattggaactgagacacggtccaaactcctacgggaggcagcagtgaggaatattggtcaatgggcgagagcctgaaccagccaagtagcgtgaaggatgaaggctctatgggtcgtaaacttcttttatatgggaataaagttttccacgtgtggaattttgtatgtaccatatgaataaggatcggctaactccgtgccagcagccgcggtaatacggaggatccgagcgttatccggatttattgggtttaaagggagcgtaggtggattgttaagtcagttgtgaaagtttgcggctcaaccgtaaaattgcagttgaaactggcagtcttgagtacagtagaggtgggcggaattcgtggtgtagcggtgaaatgcttagatatcacgaagaactccgattgcgaaggcagctcactagactgtnactgacactgatgctcgaaagtgtgggtatcaaacaggattagataccctggtagtccacacagtaaacgatgaatactcgctgtttgcgatatacagtaagcggccaagcgaaagcattaagtattccacctggggagtacgccggcaacggtgaaactcaaaggaattgacgggggcccgcacaagcggaggaacatgtggtttaattcgatgatacgcgaggaaccttacccgggcttaaattgcaacagagtgtatcggaaaaatgcttgccgtaaggctgttgtgaaggtgctgcatggttgtcgtcagctcgtgccgtgaggtgtcggcttaagtgccataacgagcgcaacccttatctttagttactaacaggttatgctgaggactctagagagactgccgtcgtaagatgtgaggaaggtggggatgacgtcaaatcagcacggcccttacgtccggggctacacacgtgttacaatggggggtacagaaggcggctacctggtgacaggatgctaatcccaaaaacctctctcagttcggatcgaagtctgcaacccgacttcgtgaagctggattcgctagtaatcgcgcatcagccatggcgcggtgaatacgttcccgggccttgtacacaccgcccgtcaagccatgaaagccgggggtacctgaagtacgta

SEQ ID NO: 18 - DNA, 1373 bp, Artificial Sequence
  STR00072 Collinsella_aerofaciens_strain_JCM_10188_16S_ribosomal_RNA
  misc_feature (10)..(10): n is a, c, g, or t
  misc_feature (23)..(24): n is a, c, g, or t
gcgagtggangttcttcggagcnnaagctagcggcggacgggtgagtaacacgtgggcaacctgcctcatagaggggaatagcctcccgaaagggagattaataccgcataagattgtagcttcgcatgaagtagcaattaaaggagcaatccgctatgagatgggcccgcggcgcattagctagttggtgaggtaacggctcaccaaggcgacgatgcgtagccgacctgagagggtgatcggccacattgggactgagacacggcccagactcctacgggaggcagcagtggggaatattgcacaatgggggaaaccctgatgcagcaatgccgcgtgagtgatgacggccttcgggttgtaaagctctgtcttcggggacgataatgacggtacccgaggaggaagccacggctaactacgtgccagcagccgcggtaatacgtaggtggcaagcgttgtccggatttactgggcgtaaagggagcgtaggcggatttttaagtgagatgtgaaatacccgggcttaacttgggtgctgcatttcaaactggaagtctagagtgcaggagaggagaagggaattcctagtgtagcggtgaaatgcgtagagattaggaagaacaccagtggcgaaggcgcttctctggactgtaactgacgctgaggctcgaaagcgtggggagcaaacaggattagataccctggtagtccacgccgtaaacgatgaatactaggtgtaggggttgtcatgacctctgtgccgccgctaacgcattaagtattccgcctggggagtacggtcgcaagattaaaactcaaaggaattgacgggggcccgcacaagcagcggagcatgtggtttaattcgaagcaacgcgaagaatcttacctagacttgacgtctcctgaattacccgtaactggggaagtcgcttcggcgacaggaagacaggtggtgcatggttgtcgtcagctcgtgtcgtgagatgttgggttaagtcccgcaacgagcgcaacccttattgttagttgctaccatttagttgagcactctagcgagactgcccgggttaaccgggaggaaggtggggatgacgtcaaatcatcatgccccttatgtctagggctacacacgtgctacaatggcaagtacaaagagaagcaagaccgcgaggtggagcaaaactcaaaaacttgtctcagttcggattgtaggctgaaactcgcctacatgaagctggagttgctagtaatcgcgaatcagcatgtcgcggtgaatacgttcccgggccttgtacacaccgcccgtcacaccatgagagttggcaatacccaaagtgcgtgatctaactcgcaagagaggaagcgc

SEQ ID NO: 19 - DNA, 1338 bp, Artificial Sequence
  STR00075.3 Collinsella_aerofaciens_strain_JCM_10188_16S_ribosomal_RNA
caacggattgagttacctagtggcggacgggtgagtaacgcgtgaggaacctgccttggagaggggaataacactccgaaaggagtgctaataccgcatgatgcagttgggtcgcatggctctgactgccaaagatttatcgctctgagatggcctcgcgtctgattagctagtaggcggggtaacggcccacctaggcgacgatcagtagccggactgagaggttgaccggccacattgggactgagacacggcccagactcctacgggaggcagcagtggggaatattgggcaatgggcgcaagcctgacccagcaacgccgcgtgaaggaagaaggctttcgggttgtaaacttcttttgtcggggacgaaacaaatgacggtacccgacgaataagccacggctaactacgtgccagcagccgcggtaatacgtaggtggcaagcgttatccggatttactgggtgtaaagggcgtgtaggcgggattgcaagtcagatgtgaaaactgggggctcaacctccagctgcatttgaaactgtagttcttgagtgctggagaggcaatcggaattccgtgtgtagcggtgaaatgcgtagatatacggaggaacaccagtggcgaaggcggattgctggacagtaactgacgctgaggcgcgaaagcgtggggagcaaacaggattagataccctggtagtccacgccgtaaacgatggatactaggtgtggggggtctgaccccctccgtgccgcagttaacacaataagtatcccacctggggagtacgatcgcaaggttgaaactcaaaggaattgacgggggcccgcacaagcggtggagtatgtggtttaattcgaagcaacgcgaagaaccttaccaggtgtagttctccagtgatggagaggcaatcggatttcggtctgtagggggaaagtggagacaggtggtgcatggttgtcgtcagctcgtgtcgtgagatgttgggttaagtcccgcaacgagcgcaacccttattgttagttgctacgcaagagcactctagcgagactgccgttgacaaaacggaggaaggtggggacgacgtcaaatcatcatgccccttatgtcctgggccacacacgtactacaatggtggttaacagagggaggcaataccgcgaggtggagcaaatccctaaaagccatcccagttcggattgcaggctgaaacccgcctgtatgaagttggaatcgctagtaatcgcggatcagcatgccgcggtgaatacgttcccgggccttgtacacaccgcccgtcacaccatgagagtcgggaacacccgaagtccgtag

SEQ ID NO: 20 - DNA, 1344 bp, Artificial Sequence
  STR00077.1 Collinsella_aerofaciens_strain_JCM_10188_16S_ribosomal_RNA
gcgattctcttcggagaagagcggcggacgggtgagtaacgcgtgggtaacctgcctcatacacatggataacataccgaaaggtatgctaatacaggataacataagagattcgcatgtttctcttatcaaagctccggcggtatgagatggacccgcgtctgattagctagttggtaaggtaatggcttaccaaggcgacgatcagtagccgacctgagagggtgatcggccacattggaactgagacacggtccaaactcctacgggaggcagcagtggggaatattgcacaatgggcgaaagcctgatgcagcaacgccgcgtgagtgatgaaggccttcgggtcgtaaaactctgtcctcaaggaagataatgacggtacttgaggaggaagccccggctaactacgtgccagcagccgcggtaatacgtagggggctagcgttatccggatttactgggcgtaaagggtgcgtaggtggtttcttaagtcaggagtgaaaggctacggcttaaccgtagtaagctcttgaaactgggaaacttgagtgcaggagaggaaagtggaattcctagtgtagcggtgaaatgcgtagatattaggaggaacaccagtagcgaaggcggctttctggactgtaactgacactgaggcacgaaagcgtggggagcaaacaggattagataccctggtagtccacgccgtaaacgatgagtactaggtgtcgggggttacccccctcggtgccgcagctaacgcattaagtactccgcctggggagtacgctcgcaagagtgaaactcaaaggaattgacggggacccgcacaagtagcggatcatgtggtttaattcgaagcaacgcgaagaaccttacctaagcttgacatccttttgaccgatgcctaatcgcatttttcccttcggggacagaagtgactcttgaaactgggtaacttgcagctcgtgtcgtgagatgttgggttaagtcccgcaacgagcgcaacccttgcctttagttgccagcattaagttgggcactctagagggactgccagggataacctggaggaaggtggggatgacgtcaaatcatcatgccccttatgcttagggctacacacgtgctacaatgggtggtacagagggcagccaagtcgtgaggccgagctaatcccttaaagccattctcagttcggattgtaggctgaaactcgcctacatgaagctggagttactagtaatcgcagatcagaatgctgcggtgaatgcgttcccgggtcttgtacacaccgcccgtcacaccacggaagttgggggcgcccgaagccacttagctaac

SEQ ID NO: 21 - DNA, 1396 bp, Artificial Sequence
  STR00076.5 Collinsella_aerofaciens_strain_JCM_10188_16S_ribosomal_RNA
  misc_feature (1381)..(1381): n is a, c, g, or t
gtcgagcgaagcacttaagtggatctcttcggattgaaacttatttgactgagcggcggacgggtgagtaacgcgtgggtaacctgcctcatacagggggataacagttagaaatggctgctaataccgcataagcgcacaggaccgcatggtctggtgtgaaaaactccggtggtatgagatggacccgcgtctgattagctagttggaggggtaacggcccaccaaggcgacgatcagtagccggcctgagagggtgaacggccacattgggactgagacacggcccagactcctacgggaggcagcagtggggaatattgcacaatgggggaaaccctgatgcagcgacgccgcgtgaaggaagaagtatctcggtatgtaaacttctatcagcagggaagaaaatgacggtacctgactaagaagccccggctaactacgtgccagcagccgcggtaatacgtagggggcaagcgttatccggatttactgggtgtaaagggagcgtagacggaagagcaagtctgatgtgaaaggctggggcttaaccccaggactgcattggaaactgtttttctagagtgccggagaggtaagcggaattcctagtgtagcggtgaaatgcgtagatattaggaggaacaccagtggcgaaggcggcttactggacggtaactgacgttgaggctcgaaagcgtggggagcaaacaggattagataccctggtagtccacgccgtaaacgatgaatactagtgtcgggtggcaaagccattcggtgccgcagcaaacgcaataagtattccacctggggagtacgttcgcaagaatgaaactcaaaggaattgacggggacccgcacaagcggtggatcatgtggtttaattcgaagcaacgcgaagaaccttaccaagtcttgacatccctctgaccggcccgtaacggggccttcccttcggggcagaggagacagggggaggtaggcggaattcctagtgtagcggtgaaattcggataaattccgaggaagagcacaacccctatccttagtagccagcaggtgaagctgggcactctagggagactgccggggataacccggaggaaggcggggacgacgtcaaatcatcatgccccttatgatttgggctacacacgtgctacaatggcgtaaacaaagggaagcgagacagtgatgttgagcaaatcccaaaaataacgtcccagttcggactgcagtctgcaactcgactgcacgaagctggaatcgctagtaatcgcgaatcagaatgtcgcggtgaatacgttcccgggtcttgtacacaccgcccgtcacaccatgggagtcagtaacgcccgaagtcagtgacccaacctanaggagggagctgccg

SEQ ID NO: 22 - DNA, 1358 bp, Artificial Sequence
  STR00078.1 Collinsella_aerofaciens_strain_JCM_10188_16S_ribosomal_RNA
gaatgaagattttgtgactgagtggcggacgggtgagtaacgcgtgggtaacctgcctcatacagggggataacagttggaaacgactgctaataccgcataagcgcacagggtcgcatgacctggtgtgaaaaactccggtggtatgagatggacccgcgtctgattagccagttggtggggtaacggcctaccaaagcgacgatcagtagccgacctgagagggtgaccggccacattgggactgagacacggcccaaactcctacgggaggcagcagtggggaatattgcacaatgggggaaaccctgatgcagcgacgccgcgtgagcgaagaagtatttcggtatgtaaagctctatcagcagggaagaagaaatgacggtacctgactaagaagcaccggctaaatacgtgccagcagccgcggtaatacgtatggtgcaagcgttatccggatttactgggtgtaaagggagcgcaggcggtacggcaagtctgatgtgaaagcccggggctcaaccccggtactgcattggaaactgtcggactagagtgtcggaggggtaagtggaattcctagtgtagcggtgaaatgcgtagatattaggaggaacaccagtggcgaaggcggcttactggacgattactgacgctgaggctcgaaagcgtggggagcaaacaggattagataccctggtagtccacgccgtaaacgatgaatactaggtgtcggggagcattgctcttcggtgccgcagcaaacgcaataagtattccacctggggagtacgttcgcaagaatgaaactcaaaggaattgacggggacccgcacaagcggtggagcatgtggtttaattcgaagcaacgcgaagaaccttaccaagtcttgacatcccgatgacagaacatgtaatgtgttttctcttccgagcatcggtgacaggtggggcatgattgtcgtcagctcgtgtcgtgagatgttgggttaagtcccgcaacgagcgcaacccctattcttagtagccagcggttcggccgggcactctagggagactgccagggataacctggaggaaggtggggatgacgtcaaatcatcatgccccttatgacttgggctacacacgtgctacaatggcgtaaacaaagggaagcgagcctgcgagggggagcaaatctcaaaaataacgtctcagttcggactgcagtctgcaactcgactgcacgaagctggaatcgctagtaatcgcgaatcagaatgtcgcggtgaatacgttcccgggtcttgtacacaccgcccgtcacaccatgggagttggtaatgcccgaagtcagtgacccaaccgcaaggagg

SEQ ID NO: 23 - DNA, 1392 bp, Artificial Sequence
  STR00079.1 Collinsella_aerofaciens_strain_JCM_10188_16S_ribosomal_RNA
tcgaacgaagcatttgcgacagatttcttcggattgaagttgcttatgactgagtggcggacgggtgagtaacgcgtgggtaacctgcctcacacagggggatagcagttggaaacggctgataataccgcataagcgcacagtaccgcatggtacagtgtgaaaaactccggtggtgtgagatggacccgcgtctgattagcttgttggcagggtaacggcctaccaaggcaacgatcagtagccgacctgagagggtgaccggccacattgggactgagacacggcccagactcctacgggaggcagcagtggggaatattgcacaatggaggaaactctgatgcagcgacgccgcgtgagtgaagaagtaattcgttatgtaaagctctatcagcagggaagatagtgacggtacctgactaagaagctccggctaaatacgtgccagcagccgcggtaatacgtatggagcaagcgttatccggatttactgggtgtaaagggagtgtaggtggcatcacaagtcagaagtgaaagcccggggctcaaccccgggactgcttttgaaactgtggagctggagtgcaggagaggcaagtggaattcctagtgtagcggtgaaatgcgtagatattaggaggaacaccagtggcgaaggcggcttgctggactgtaactgacactgaggctcgaaagcgtggggagcaaacaggattagataccctggtagtccacgccgtaaacgatgaatactaggtgtcggggctcataagagcttcggtgccgcagcaaacgcaataagtattccacctggggagtacgttcgcaagaatgaaactcaaaggaattgacggggacccgcacaagcggtggagcatgtggtttaattcgaagcaacgcgaacaaccttaccaagtcttgacatcctcttgaacggtcagtaatgtgatcttttcttcggaacagagtgcaggagaggcaagtggtagtcgtcagctcgtgtcgtgagatgttgggttaagtcccgcaacgagcgcaacccctattcttagtagccagcatttaaggtgggcactctaggaagactgccagggataacctggaggaaggtggggatgacgtcaaatcatcatgccccttatgacttgggctacacacgtgctacaatggcgtaaacaaagtgaagcgagagtgtgagcttaagcaaatcacaaaaataacgtctcagttcggattgtagtctgcaactcgactacatgaagctggaatcgctagtaatcgcgaatcagaatgtcgcggtgaatacgttcccgggtcttgtacacaccgcccgtcacaccatgggagtcggaaatgcccgaagtcggtgacctaacgaaagaaggagcc

SEQ ID NO: 24 - DNA, 1371 bp, Artificial Sequence
  STR00080.1 Collinsella_aerofaciens_strain_JCM_10188_16S_ribosomal_RNA
cactttatttgatttccttcgggactgattattttgtgactgagtggcggacgggtgagtaacgcgtgggtaacctgccttgtacagggggataacagttggaaacggctgctaataccgcataagcgcacagcatcgcatgatgcagtgtgaaaaactccggtggtataagatggacccgcgttggattagctagttggtgaggtaacggcccaccaaggcgacgatccatagccgacctgagagggtgaccggccacattgggactgagacacggcccaaactcctacgggaggcagcagtggggaatattgcacaatgggcgaaagcctgatgcagcgacgccgcgtgagcgaagaagtatttcggtatgtaaagctctatcagcagggaagataatgacggtacctgactaagaagcaccggctaaatacgtgccagcagccgcggtaatacgtatggtgcaagcgttatccggatttactgggtgtaaagggagcgcaggcggtgcggcaagttgatgtgaaagcccggggctcaaccccggtactgcattggaaactgtcgtactagagtgtcggaggggtaagcggaattcctagtgtagcggtgaaatgcgtagatattaggaggaacaccagtggcgaaggcggcttactggacgataactgacgctgagctcgaaagcgtggggagcaaacaggattagataccctggtagtccacgccgtaaacgatgaatactagtgttgggaagcattgcttctcggtgccgtcgcaaacgcagtaagtattccacctggggagtacgttcgcaagaatgaaactcaaaggaattgacggggacccgcacaagcggtggacatgtgtttaattcgaagcaacgcgaagaacttaccaagtcttgacatccttctgaccggtacttaaccgtaccttctcttcggagcaggagtgacaggtggtgcatggttgtcgtcagctcgtgtcgtgagatgttgggttaagtcccgcaacgagcgcaacccttatctttagtagccagcggttcggccgggcactctagagagactgccagggataacctggaggaaggcggggatgacgtcaaatcatcatgccccttatgacttgggctacacacgtgctacaatggcgtaaacaaagggaagcaaagctgtgaagccgagcaaatctcaaaaataacgtctcagttcggactgtagtctgcaacccgactacacgaagctggaatcgctagtaatcgcagatcagaatgctgcggtgaatacgttcccgggtcttgtacacaccgcccgtcacaccatgggagttgggaatgcccgaagccagtgacctaaccgaaaggaa

SEQ ID NO: 25 - DNA, 1383 bp, Artificial Sequence
  STR00082.1 Collinsella_aerofaciens_strain_JCM_10188_16S_ribosomal_RNA
  misc_feature (1060)..(1060): n is a, c, g, or t
cgaagcactttatttgatttcttcggaatgaagattttgtgactgagtggcggacgggtgagtaacgcgtgggtaacctgcctcatacagggggataacagttggaaacgactgctaataccgcataagcgcacagggtcgcatgacctggtgtgaaaaactccggtggtatgagatggacccgcgtctgattagccagttggtggggtaacggcctaccaaagcgacgatcagtagccgacctgagagggtgaccggccacattgggactgagacacggcccaaactcctacgggaggcagcagtggggaatattgcacaatgggggaaaccctgatgcagcgacgccgcgtgagcgaagaagtatttcggtatgtaaagctctatcagcagggaagaagaaatgacggtacctgactaagaagcaccggctaaatacgtgccagcagccgcggtaatacgtatggtgcaagcgttatccggatttactgggtgtaaagggagcgcaggcggtacggcaagtctgatgtgaaagcccggggctcaaccccggtactgcattggaaactgtcggactagagtgtcggaggggtaagtggaattcctagtgtagcggtgaaatgcgtagatattaggaggaacaccagtggcgaaggcggcttactggacgattactgacgctgaggctcgaaagcgtggggagcaaacaggattagataccctggtagtccacgccgtaaacgatgaatactaggtgtcggggagcattgctcttcggtgccgcagcaaacgcaataagtattccacctggggagtacgttcgcaagaatgaaactcaaaggaattgacggggacccgcacaagcggtggagcatgtggtttaattcgaagcaacgcgaagaaccttaccaagtcttgacatcccgatgacagaacatgtaatgtgttttctcttcggagcatcgttgacagctggcgcatggtagtcgtcagctcgtgtcgtgagatgttagggtaacggccaaaacgagcgcaacccctattcttagtagccagcggntaggccgggcactctagggagactgccagggataacctggaggaaggtggggatgacgtcaaatcatcatgccccttatgacttgggctacacacgtgctacaatggcgtaaacaaagggaagcgagcctgcgagggggagcaaatctcaaaaataacgtctcagttcggactgcagtctgcaactcgactgcacgaagctggaatcgctagtaatcgcgaatcagaatgtcgcggtgaatacgttcccgggtcttgtacacaccgcccgtcacaccatgggagttggtaatgcccgaagtcagtgacccaaccgcaaggagg

SEQ ID NO: 26 - DNA, 1374 bp, Artificial Sequence
  STR00085.1 Collinsella_aerofaciens_strain_JCM_10188_16S_ribosomal_RNA
cataaggaacggattatttcggtaagaagtactttatgactgagtggcggacgggtgagtaacgcgtggataacctgcctcatacagggggataacagttagaaatgactgctaataccgcataagcgcacagtgctgcatggcacagtgtgaaaagctccggcggtatgagatggatccgcgtttgattagctagttggtggggtaaaggcctaccaaggcgacgatcaatagccgacctgagagggtgaccggccacattgggactgagacacggcccaaactcctacgggaggcagcagtggggaatattgcacaatgggggaaaccctgatgcagcgacgccgcgtgaaggaagaagtatttcggtatgtaaacttctatcagcagggaagaaaatgacggtacctgactaagaagccccggctaattacgtgccagcagccgcggtaatacgtaaggggcaagcgttatccggatttactgggtgtaaagggagcgtagacggcagtgcaagtctgatgtgaaagcccggggctcaaccccgggactgcattggaaactgtgcagctagagtgtcggagaggtaagtggaattcctagtgtagcggtgaaatgcgtagatattaggaggaacaccagtggcgaaggcggcttactggacgataactgacgttgaggctcgaaagcgtggggagcaaacaggattagataccctggtagtccacgccgtaaacgatgaatactagtgtcgggcgccaaaggcgttcggtgccgcagcaaacgcaataagtattccacctggggagtacgttcgcaagaatgaaactcaaaggaattgacggggacccgcacaagcggtggagcatgtggtttaattcgaagcaacgcgaagaaccttaccaagtcttgacatctgcctgaccggtccgtaacaggacccttccgttgggaaaggcaagacaggtggtgcatggttgtcgtcagctcgtgtcgtgagatgttgggttaagtcccgcaacgagcgcaacccttatccttagtagccagcaggtagagctgggcactctagggagactgccagggacaacctggaggaaggtggggatgacgtcaaatcatcatgccccttatgatttgggctacacacgtgctacaatggcgtaaacaaagggaggcgaaggggtgacctggagcaaatcccaaaaataacgtctcagttcggattgtagtctgcaactcgactacatgaagctggaatcgctagtaatcgcgaatcagaatgtcgcggtgaatacgttcccgggtcttgtacacaccgcccgtcacaccatgggagtcggatatgcccgaagccggtgaccgaacccgaaa

SEQ ID NO: 27 - DNA, 1373 bp, Artificial Sequence
  STR00086 Collinsella_aerofaciens_strain_JCM_10188_16S_ribosomal_RNA
gcgaaccacttcggtggtgagcggcgaacgggtgagtaacacgtaggttatctgcccatcagacggggacaacgattggaaacgatcgctaataccggataggacgaaagtttaaaggtgcttcggcaccactgatggatgagcctgcggcgcattagctagttggtagggtaaaggcctaccaaggcgacgatgcgtagccgacctgagagggtgaacggccacactgggactgagacacggcccagactcctacgggaggcagcagtagggaatcttcggcaatgggcgaaagcctgaccgagcaacgccgcgtgaatgatgaaggccttcgggttgtaaaattctgttataagggaagaatggctctagtaggaaatggctagagtgtgacggtaccttatgagaaagccacggctaactacgtgccagcagccgcggtaatacgtaggtggcgagcgttatccggaattattgggcgtaaagagcgcgcaggtggttgattaagtctgatgtgaaagcccacggcttaaccgtggagggtcattggaaactggtcaacttgagtgcagaagagggaagtggaattccatgtgtagcggtgaaatgcgtagagatatggaggaacaccagtggcgaaggcggcttcctggtctgtaactgacactgaggcgcgaaagcgtggggagcaaacaggattagataccctggtagtccacgccgtaaacgatgagtgctaagtgttgggggtcgaacctcagtgctgaagttaacgcattaagcactccgcctggggagtacggtcgcaagactgaaactcaaaggaattgacggggacccgcacaagcggtggagcatgtggtttaattcgaagcaacgcgaagaaccttaccaggtcttgacataccagtgaccgtcctagagataggattttcccttcggggaaagcgcacggcttagccgtgggggttcattggacacgtgtcgagatgtgtggagaaaagtcccgcaacgagcgcaacccctgtcgttagttgccagcattcagttggggactctaacgagactgccagtgacaaactggaggaaggtggggatgacgtcaaatcatcatgccccttatgacctgggctacacacgtgctacaatggttggtacaaagagaagcgaagcggtgacgtggagcaaacctcataaagccaatctcagttcggattgtaggctgcaactcgcctacatgaagttggaatcgctagtaatcgcgaatcagcatgtcgcggtgaatacgttcccgggtcttgtacacaccgcccgtcacaccacgagagtttacaacacccgaagtcagtggcctaaccgcaaggagggagctg

SEQ ID NO: 28 - DNA, 1301 bp, Artificial Sequence
  STR00089.1 Collinsella_aerofaciens_strain_JCM_10188_16S_ribosomal_RNA
ttctcttcggagaagagcggcggacgggtgagtaacgcgtgggtaacctgcctcatacacatggataacataccgaaaggtatgctaatacaggataacataagagattcgcatgtttctcttatcaaagctccggcggtatgagatggacccgcgtctgattagctagttggtaaggtaatggcttaccaaggcgacgatcagtagccgacctgagagggtgatcggccacattggaactgagacacggtccaaactcctacgggaggcagcagtggggaatattgcacaatgggcgaaagcctgatgcagcaacgccgcgtgagtgatgaaggccttcgggtcgtaaaactctgtcctcaaggaagataagcggactgaacccgatacgtgccaccgaaagggggagtcggatttactgggcgtaaagggtgcgtaggtggtttcttaagtcaggagtgaaaggctacggcttaaccgtagtaagctcttgaaactgggaaacttgagtgcaggagaggaaagtggaattcctagtgtagcggtgaaatgcgtagatattaggaggaacaccagtagcgaaggcggctttctggactgtaactgacactgaggcacgaaagcgtggggagcaaacaggattagataccctggtagtccacgccgtaaacgatgagtactagtgtcgggggttacccccctcggtgccgcagctaacgcattaagtactccgcctggggagtacgctcgcaagagtgaaactcaaaggaattgacggggacccgcacaagtagcggagcatgtggtttaattcgaagcaacgcgaagaaccttacctaagcttgacatccttttgaccgatgcctaatcgcatttttcccttcggggacagaagtgacaggtggtgcatgggagtcgtcagctcgtgtcgtgagatgttgggttaagtcccgcaacgagcgcaacccttgcctttagttgccagcattaagttgggcactctagagggactgccagggataacctggaggaaggtggggatgacgtcaaatcatcatgccccttatgcttagggctacacacgtgctacaatgggtggtacagagggcagccaagtcgtgaggccgagctaatcccttaaagccattctcagttcggattgtaggctgaaactcgcctacatgaagctggagttactagtaatcgcagatcagaatgctgcggtgaatgcgttcccgggtcttgtacacaccgcccgtcacaccacggaagttgggggcgcccgaagccacttagctaac

SEQ ID NO: 29 - DNA, 1335 bp, Artificial Sequence
  STR00090 Collinsella_aerofaciens_strain_JCM_10188_16S_ribosomal_RNA
tgcgaggagcttgctcctcaaagttagtggcggacgggtgagtaacgcgtgggtaacctgccctatgcagggggataacgtttggaaacgaacgctaataccgcataacctagttggttcgcatgaactgactagcaaagatttatcggcataggatggacccgcgttagattagctagttggtgagataacagcccaccaaggcaacgatctatagccggcctgagagggtgaacggccacactgggactgagacacggcccagactcctacgggaggcagcagtggggaatattgcacaatgggcgcaagcctgatgcagcgacgccgcgtgaaggatgaaggtcttcggatcgtaaacttctatcagcagggaagaataccatgacggtacctgataagaagccccggctaactacgtgccagcagccgcggtaatacgtagggggcaagcgtcggaattactgggtgtaaagggtgcgtaggtggcgatttaagtcagatgtgaaaactcagggctcaaccttgagactgcatctgaaactgagttgctagagtgcaggagaggaaagcggaattccgagtgtagcggtgaaatgcgtagatattcggaggaacaccagtagcgaaggcggctttctggactgtaactgacactgaggcacgaaagcgtggggagcgaacaggattagataccctggtagtccacgccgtaaacgatgaatactaggtgtcggggctcacgggtctcggtgccgcagctaacgcattaagtattccacctgggaagtacgaccgcaaggttgaaactcaaaggaattgacggggacccgcacaagcggtggagcatgtggtttaattcgaagcaacgcgaagaaccttacctaaacttgacatccttttgaccgatccttaatcggatctttactagcttgctagtacagagcaggagaggagagcatggttgtcgtcagctcgtgtcgtgagatgttgggttaagtcccgcaacgagcgcaacccctatctttagtagccatcattcagttgggcactctagagagactgccagggataacctggaggaaggtggggatgacgtcaaatcatcatgccccttatgtttagggctacacacgtgctacaatgggtgctacaaagggaagcaaaaccgcgaggtcaagcaaatcccaaaaaggcactcccagttcggattgtagtctgcaactcgactacatgaagttggaatcgctagtaatcgcgaatcagaatgtcgcggtgaatacgttcccgggtcttgtacacaccgcccgtcacaccacgggagttgggggggcc

SEQ ID NO: 30 - DNA, 1384 bp, Artificial Sequence
  STR00091.1 Collinsella_aerofaciens_strain_JCM_10188_16S_ribosomal_RNA
  misc_feature (1371)..(1371): n is a, c, g, or t
agcgaagcacttaagtggatctcttcggattgaaacttatttgactgagcggcggacgggtgagtaacgcgtgggtaacctgcctcatacagggggataacagttagaaatggctgctaataccgcataagcgcacaggaccgcatggtctggtgtgaaaaactccggtggtatgagatggacccgcgtctgattagctagttggaggggtaacggcccaccaaggcgacgatcagtagccggcctgagagggtgaacggccacattgggactgagacacggcccagactcctacgggaggcagcagtggggaatattgcacaatgggggaaaccctgatgcagcgacgccgcgtgaaggaagaagtatctcggtatgtaaacttctatcagcagggaagaaaatgacggtacctgctaagaagccccggctaactacgtgccagcagccgcggtaatacgtagggggcaagcgttatccggatttactgggtgtaaagggagcgtagacggaagagcaagtctgatgtgaaaggctggggcttaaccccaggactgcattggaaactgtttttctagagtgccggagaggtaagcggaattcctagtgtagcggtgaaatgcgtagatattaggaggaacaccagtggcgaaggcggcttactggacggtaactgacgttgaggctcgaaagcgtggggagcaaacaggattagataccctggtagtccacgccgtaaacgatgaatactagtgtcgggtggcaaagccattcggtgccgcagcaaacgcaataagtattccacctggggagtacgttcgcaagaatgaaactcaaaggaattgacggggacccgcacaagcggtggaacatgtggtttaattcgaagcaacgcgaagaaacgtctcaagtgataggctgccgcttaaccccacgactgcgggccttcccttcggggcagaggagacaggtggtgcatggttgtcgtcagctcgtgtcgtgagatgttgggttaagtcccgcaacgagcgcaacccctatccttagtagccagcaggtgaagctgggcactctagggagactgccggggataacccggaggaaggcggggacgacgtcaaatcatcatgccccttatgatttgggctacacacgtgctacaatggcgtaaacaaagggaagcgagacagtgatgttgagcaaatcccaaaaataacgtcccagttcggactgcagtctgcaactcgactgcacgaagctggaatcgctagtaatcgcgaatcagaatgtcgcggtgaatacgttcccgggtcttgtacacaccgcccgtcacaccatgggagtcagtaacgcccgaagtcagtgacccancctacaggaggga

SEQ ID NO: 31 - DNA, 1377 bp, Artificial Sequence
  STR00092.6 Collinsella_aerofaciens_strain_JCM_10188_16S_ribosomal_RNA
acgcgagcacttgtgctcgagtggcgaacgggtgagtaatacataagtaacctgccctagacagggggataactattggaaacgatagctaagaccgcataggtacggacactgcatggtgaccgtattaaaagtgcctcaaagcactggtagaggatggacttatggcgcattagctggttggcggggtaacggcccaccaaggcgacgatgcgtagccgacctgagagggtgaccggccacactgggactgagacacggcccagactcctacgggaggcagcagtagggaattttcggcaatgggggaaaccctgaccgagcaacgccgcgtgaaggaagaaggttttcggattgtaaacttctgttataaaggaagaacggcggctacaggaaatggtagccgagtgacggtactttattagaaagccacggctaactacgtgccagcagccgcggtaatacgtaggtggcaagcgttatccggaattattgggcgtaaagagggagcaggcggcagcaagggtctgtggtgaaagcctgaagcttaacttcagtaagccatagaaaccaggcagctagagtgcaggagaggatcgtggaattccatgtgtagcggtgaaatgcgtagatatatggaggaacaccagtggcgaaggcgacgatctggcctgcaactgacgctcagtcccgaaagcgtggggagcaaataggattagataccctagtagtccacgccgtaaacgatgagtactaagtgttggatgtcaaagttcagtgctgcagttaacgcaataagtactccgcctgagtagtacgttcgcaagaatgaaactcaaaggaattgacgggggcccgcacaagcggtggatcatgtggtttaattcgaagcaacgcgaagaaccttaccgggtcttgacatactcataaaggctccagagatggagagatagctatatgagatacaggtggtgcatggttgtcgtcagctcgtgtcgtgagatgttgggttaagtcccgcaacgagcgcaacccttatcgttagttaccatcattaagttggggactctagcgagactgccagtgacaagctggaggaaggcggggatgacgtcaaatcatcatgccccttatgacctgggctacacacgtgctacaatggatggtgcagagggaagcgaagccgcgaggtgaagcaaaacccataaaaccattctcagttcggattgtagtctgcaactcgactacatgaagttggaatcgctagtaatcgcgaatcagcatgtcgcggtgaatacgttctcgggccttgtacacaccgcccgtcacaccacgagagttgataacacccgaagccggtggcctaaccgcaaggaa

SEQ ID NO: 32 - DNA, 1325 bp, Artificial Sequence
  STR00094.1 Collinsella_aerofaciens_strain_JCM_10188_16S_ribosomal_RNA
  misc_feature (10)..(10): n is a, c, g, or t
gacgggtgantaacgcgtgggtaacctgccctatacacgcggatgacgtaccgaaaggtacgctaatacgagatgatatatttttatcgcatggtagaaatatcaaagctccggcggtataggatggacccgcgtctgattagctagttggtaaggtaacggcttaccaaggcgacgatcagtagccgacctgagagggtgatcggccacattggaactgagacacggtccaaactcctacgggaggcagcagtggggaatattgcacaatgggcgaaagcctgatgcagcaacgccgcgtgagcgatgaaggccttcgggtcgtaaagctctgtcctcaaggaagataatgacggtacttgaggaggaagccccggctaactacgtgccagcagccgcggtaatacgtagggggctagcgttatccggaattactgggcgtaaagggtgcgtaggtggtttcttaagtcagaggtgaaaggctacggctcaaccgtagtaagcctttgaaactgggaaacttgagtgcaggagaggagagtagaattcctagtgtagcggtgaaatgcgtagatattaggaggaataccagttgcgaaggcggctctctggactgtaactgacactgaggcacgaaagcgtggggagcaaacaggattagataccctggtagtccacgccgtaaacgatgagtactagctgtcggaggttacccccttcggtggcgcagctaacgcattaagtactccgcctgggaagtacgctcgcaagagtgaaactcaaaggaattgacggggacccgcacaagtagcggagcatgtggtttaattcgaagcaacgcgaagaaccttacctaagcttgacatccttttgacctctccctaatcggagatttcccttcggggacagaagtgacaggagaggagagtagaattcctagtgtagcggtgaaatgtggggttattaccaggaataagcgcaacccttgcctttagttgccagcattaagttgggcactctagagggactgccagggataacctggaggaaggtggggatgacgtcaaatcatcatgccccttatgcttagggctacacacgtgctacaatgggtggtacagagggcagccaagtcgtgaggcggagctaatcccttaaagccattctcagttcggattgtaggctgaaactcgcctacatgaagctggagttactagtaatcgcagatcagaatgctgcggtgaatgcgttcccgggtcttgtacacaccgcccgtcacaccatgggagttgggggcgcccgaagccggttagctaacctttagg

SEQ ID NO: 33 - DNA, 1323 bp, Artificial Sequence
  STR00098.1 Collinsella_aerofaciens_strain_JCM_10188_16S_ribosomal_RNA
  misc_feature (680)..(680): n is a, c, g, or t
gacgggtgagtaacccgtgggtaacctgcctcatacagggggataacagttagaaatgactgctaataccgcataagaccacggtaccgcatggtacagtgggaaaaactccggtggtatgagatggacccgcgtctgattagctagttggtaaggtaacggcttaccaaggcgacgatcagtagccgacctgagagggtgaccggccacattgggactgagacacggcccaaactcctacgggaggcagcagtggggaatattgcacaatgggggaaaccctgatgcaacgacgccgcgtgaaggatgaagtatttcggtatgtaaactttatcagcagggaaaaatgacggtacctgactagaagccccgctaactacgtgccagcagccgcggtaatacgtagggggcaagcgttatccggatttactgggtgtaaagggagcgtagacggttatgtaagtctgatgtgaaaacccggggctcaaccccgggactgcattggaaactatgtaactagagtgtcggagaggtaagtggaattcctagtgtagcggtgaaatgcgtagatattaggaggaacaccatggcgaaggcggcttactggacgatgactgacgttgaggctcgaaagcgtggggagcaaacaggattagataccctggtagtccacgccgtanacgatgcatactacgtgtcgggtggcaaagccattcggtgccgcatcaaacgcaataagtatgcctcctggggagtacgttcgcaagaatgaaactctaaggaattgacggggacccgcacaagcggtggatcatgtggatgaatctaaagcaacgcgaagatcattgcaattcctagtgtacccctggaccggcgcgtaatggtgcctttccttcgggacaggggagacaggtggtgcatggttgtcgtcagctcgtgtcgtgagatgttgggttaagtcccgcaacgagcgcaacccttatctttagtagccagcggttcggccgggcactctagagagactgccagggataacctggaggaaggtggggatgacgtcaaatcatcatgccccttatgagcagggctacacacgtgctacaatggcgtaaacaaagggaggcgaagccgcgaggtggagcaaatcccaaaaataacgtctcagttcggattgtagtctgcaactcgactacatgaagctggaatcgctagtaatcgcgaatcagaatgtcgcggtgaatacgttcccgggtcttgtacacaccgcccgtcacaccatgggagttggtaacgcccgaagtcagtgacccaaccgtaaggagg

SEQ ID NO: 34 - DNA, 1378 bp, Artificial Sequence
  STR00093.1 Collinsella_aerofaciens_strain_JCM_10188_16S_ribosomal_RNA
ttatttaaatagaacccttcggggtgacgttttaataacttagtggcggacgggtgagtaacgcgtgagtaacctgcctttcagagggggataacgtcctgaaaaggacgctaataccgcatgatatatttgtgccgcatggtatggatatcaaaggagcaatccgctggaagatggactcgcgtccgattagctagttggaggggtaacggcccaccaaggcgacgatcggtagccggactgagaggttgaacggccacattgggactgagacacggcccagactcctacgggaggcagcagtgggggatattgcgcaatgggggaaaccctgacgcagcaacgccgcgtgaaggaagaaggttttcggattgtaaacttcttttctaagggacgaagaagtgacggtaccttaggaataagctccggctaactacgtgccagcagccgcggtaatacgtagggagcaagcgttgtccggatttactgggtgtaaagggtgcgtaggcggcaatgcaagtcagatgtgaaatgcacgggctcaacccgtgagctgcatttgaaactgtgttgcttgagtgaggtagaggcaggcggaattcccggtgtagcggtgaaatgcgtagagatcgggaggaacaccagtggcgaaggcggcctgctgggccttaactgacgctgatgcacgaaagcgtgggtagcaaacaggattagataccctggtagtccacgctgtaaacgatgattactaggtgtggggggtctgaccccttccgtgccgcagttaacacaataagtaatccacctggggagtacggccgcaaggttgaaactcaaaggaattgacgggggcccgcacaagcagtggagtatgtggtttaattcgaagcaacgcgaagaaccttaccaggtcttgacgtccagctaacgaagtagagatacattgtagcccttaagggcaaagagatcgggagggacaccagttgcgaaggcggcctgctgggccttaattggctcagatccacgaacgagcgcaacccttgctgttagttgctacgcaagagcactctaacaggactgccgttgacaaaacggaggaaggtggggacgacgtcaaatcatcatgccccttatgacctgggctacacacgtactacaatggccgtcaacagagggaagcaagaccgcgaggtggagcaaacccccaaaaacggccccagttcggattgtaggctgcaacccgcctacatgaagtcggaattgctagtaatcgcggatcagcatgccgcggtgaatacgttcccgggccttgtacacaccgcccgtcacaccatgggagccggtaatacccgaagtcagtagcctaaccgcaaggagg

SEQ ID NO: 35 - DNA, 1386 bp, Artificial Sequence
  STR00096.5 Collinsella_aerofaciens_strain_JCM_10188_16S_ribosomal_RNA
tcgagcgaagcactttacttagatttcttcggattgaagagtgttgtgactgagcggcggacgggtgagtaacgcgtgggtaacctgcctcatacagggggataacagttagaaatgactgctaataccgtataagaccacggtgccgcatggcacagtggtaaaaactccggtggtatgagatggacccgcgtctgattagcttgttggtaaggtaacggcttaccaaggcgacgatcagtagccgacctgagagggtgaccggccacattgggactgagacacggcccaaactcctacgggaggcagcagtggggaatattgcacaatgggggaaaccctgatgcagcgacgccgcgtgaaggatgaagtatttcggtatgtaaacttctatcagcagggaagaaaatgacggtacctgataagaagccccggctaactacgtgccagcagccgcggtaatacgtagggggcaagcgttatccggatttactgggtgtaaagggagcgtagacggtgatgcaagttgatgtgaaaacccggggctcaaccccgggactgcattggaaactgtgtgactagagtgtcggagaggtaagtggaattcctagtgtagcggtgaaatgcgtagatattaggaggaacaccagtggcgaaggcggcttactggacgatgactgacgttgaggctcgaaagcgtggggagcaaacaggattagataccctggtagtccacgccgtaaacgatgaatactaagtgtcgggtggcaaagccattcggtgccgcagcaaacgcagtaagtattccacctggggagtacgttcgcaagaatgaaactcaaaggaattgacggggacccgcacaagcggtggagcatgtggtttaattcgaagcaacgcgaagaaccttacctgctcttgacatcccgctgaccggccagtaatgtggccttcccttcggggcagtggagacaggtggtgcatggttgtcgtcagctcgtgtcgtgagatgttgggttaagtcccgcaacgagcgcaacccttatctttagtagccagcggtcaggccgggcactctagagagactgccagggataacctggaggaaggtggggatgacgtcaaatcatcatgccccttatgagcagggctacacacgtgctacaatggcgtaaacaaagggaggcaatactgtgaagtggagcaaatcccaaaaataacgtctcagttcggattgtagtctgcaactcgactacatgaagctggaatcgctagtaatcgcgaatcagaatgtcgcggtgaatacgttcccgggtcttgtacacaccgcccgtcacaccatgggagttggtaacgcccgaagtcagtgacccaaccgcaaggagg

SEQ ID NO: 36 - DNA, 1369 bp, Artificial Sequence
  STR00097.3 Collinsella_aerofaciens_strain_JCM_10188_16S_ribosomal_RNA
  misc_feature (22)..(22): n is a, c, g, or t
gagcgagaagccattgactganacttcggtgagaaggatatggtggaaagcggcggacgggtgagtaacgcgtaggcaacctgccccttacagagggatagccattggaaacgatgattaaaacctcataacgcatcccccccacatggaggggatgccaaagattcatcggtaagggatgggcctgcgtctgattagcttgttggcggggtaacggcccaccaaggcgacgatcagtagccgacctgagagggtgatcggccacattggaactgagacacggtccaaactcctacgggaggcagcagtggggaatattgcacaatgggcgaaagcctgatgcagcaacgccgcgtgagggatgaaggccttcgggtcgtaaacctctgtccttggggaagaaacaaatgacggtacccatggaggaagccccggctaactacgtgccagcagccgcggtaatacgtagggggcgagcgttatccggaattattgggcgtaaagagtgcgtaggtggttacctaagcgcagggtctaaggcaatggctcaaccattgttcgcctgcgaactgggctacttgagtgcaggagaggaaagcggaattcctagtgtagcggtgaaatgcgtagatattaggaggaacaccagtggcgaaggcggctttctggactgttactgacactgaggcacgaaagcgtggggagcaaacaggattagataccctggtagtccacgccgtaaacgatgagcactaggtgtcggggccgcaaggcttcggtgccgcagttaacgcattaagtgctccgcctggggagtacgcacgcaagtgtgaaactcaaaggaattgacggggacccgcacaagcagcggagcatgtggtttaattcgaagcaacgcgaagaaccttaccaggacttgacatcccactgacagatccctaaccggatccttcttcggacagtggatacaggtggtgcatggttgtcgtcagctcgtgtcgtgagatgttgggctaagtcccgcaacgagcgcaacccttgccattagttgccatcattcagttgggcactctaatgggactgccggggacaactcggaggaaggtggggatgacgtcaaatcatcatgccccttatgttctgggctacacacgtgctacaatggccggtacagcaagaagcaaaaccgcgaggtggagcaaatctcaaaaaccggtcccagttcggactgcaggctgaaacccgcctgcacgaagccggagttgctagtaatcgtggatcagaatgccacggtgaatgcgttcccgggtcttgtacacaccgcccgtcacaccatggaagttgggggtgcccgaagccggcagggaaa

SEQ ID NO: 37 - DNA, 1352 bp, Artificial Sequence
  STR00100.1 Collinsella_aerofaciens_strain_JCM_10188_16S_ribosomal_RNA
  misc_feature (15)..(15): n is a, c, g, or t
tggcgaccggcgcangggtgagtaacacgtatgccaacctgccgtctactcttggacagccttctgaaaggaagattaatacaagatggcatcatgagtccgcatgttcacatgattaaaggtattccggtagacgatggggatgcgttccattagatagtaggcggggtaacggcccacctagtcttcgatggataggggttctgagaggaaggtcccccacattggaactgagacacggtccaaactcctacgggaggcagcagtgaggaatattggtcaatgggcgagagcctgaaccagccaagtagcgtgaaggatgactgccctatgggttgtaaacttcttttataaaggaataaagtcgggtatggatacccgtttgcatgtactttatgaataaggatcggctaactccgtgccagcagccgcggtaatacggaggatccgagcgttatccggatttattgggtttaaagggagcgtagatggatgtttaagtcagttgtgaaagtttgcggctcaaccgtaaaattgcagttgatactggatatcttgagtgcagttgaggcaggcggaattcgtggtgtagcggtgaaatgcttagatatcacgaagaactccgattgcgaaggcagcctgctaagctgcaactgacattgaggctcgaaagtgtgggtatcaaacaggattagataccctggtagtccacacggtaaacgatgaatactcgctgtttgcgatatactgcaagcggccaagcgaaagcgttaagtattccacctggggagtacgccggcaacggtgaaactcaaaggaattgacgggggcccgcacaagcggaggaacatgtggtttaattcgatgatacgcgaggaaccttacccgggcttaaattgcagatgaattacggtgaaagccgtaagccgcaaggcatctgtgaaggtgctgcatggttgtcgtcagctcgtgccgtgaggtgtcggcttaagtgccataacgagcgcaacccttgttgtcagttactaacaggttttgctgaggactctgacaagactgccatcgtaagatgtgaggaaggtggggatgacgtcaaatcagcacggcccttacgtccggggctacacacgtgttacaatggggggtacagagggccgctaccacgcgagtggatgccaatccccaaaacctctctcagttcggactggagtctgcaacccgactccacgaagctggattcgctagtaatcgcgcatcagccacggcgcggtgaatacgttcccgggccttgtacacaccgcccgtcaagccatgggagccgggggtacctgaagtgcgtaaccgcgaggagc

SEQ ID NO: 38 - DNA, 1358 bp, Artificial Sequence
  STR00099.1 Collinsella_aerofaciens_strain_JCM_10188_16S_ribosomal_RNA
agcgatgaagcccttcggggtggattagcggcggacgggtgagtaacacgtgggtaacctgccttgtagagggggatagccttccgaaaggaagattaataccgcataacatctttttatcgcatggtagaaagatcaaaggagcaatccgctacaagatggacccgcggcgcattagctagttggtgaggtaacggctcaccaaggcgacgatgcgtagccgacctgagagggtgatcggccacattggaactgagacacggtccagactcctacgggaggcagcagtggggaatattgcgcaatgggggaaaccctgacgcagcaacgccgcgtgaatgaagaaggccttagggttgtaaagttctgtttacggggacgataatgacggtacccgtgggaagccacggctaactacgtgccagcagccgcggtaatacgtaggtggcaagcgttgtccggatttactgggcgtaaaggatgcgtaggcggatgtttaagtgagatgtgaaatacccgggctcaacttgggtgctgcatttcaaactggcatctagagtgcgggagaggaaagcggaattcctagtgtagcggtgaaatgcgtagagattaggaagaacaccagtggcgaaggcggctttctggaccgtaactgacgctgaggcatgaaagcgtggggagcaaacaggattagataccctggtagtccacgccgtaaacgatgaatactaggtgtaggaggtatcgactccttctgtgccgcagttaacacaataagtattccgcctgggaagtacgatcgcaagattaaaactcaaaggaattgacgggggcccgcacaagcagcggagcatgtggtttaattcgaagcaacgcgaagaaccttacctagacttgacatctcctgaattacacttaatcgtggaagcccctcggggcgaaagcggaattgctagtggagcggtgaaatgcgtagagattaggaataggatcagtgcccgcaacgagcgcaacccttatcattagttgctaccattaagttgagcactctagtgagactgccacggttaacgtggaggaaggtggggatgacgtcaaatcatcatgccccttatgtctagggctacacacgtgctacaatggtgaatacaaatagatgcaataccgcgaggtggagccaaactataaaattcatcccagttcggattgcagtctgaaactcgactgcatgaagccggagttgctagtaatcgcgaatcagcatgtcgcggtgaatacgttcccgggccttgtacacaccgcccgtcacaccatgagagctggtaacacccgaagtccgtgaggtaaccgcaaggagc

SEQ ID NO: 39 - DNA, 1390 bp, Artificial Sequence
  STR00101.1 Collinsella_aerofaciens_strain_JCM_10188_16S_ribosomal_RNA
  misc_feature (20)..(20): n is a, c, g, or t
tcgagcgaagcgctaagacnggatttcttcggattgaagtctttgtgactgagcggcggacgggtgagtaacgcgtgggtaacctgcctcatacagggggataacagttagaaatgactgctaataccgcataagcgcacaggaccgcatggtctggtgtgaaaaactccggtggtatgagatggacccgcgtctgattagctagttggaggggtaacggcccaccaaggcgacgatcagtagccggcctgagagggtgaacggccacattgggactgagacacggcccagactcctacgggaggcagcagtggggaatattgcacaatgggggaaaccctgatgcagcgacgccgcgtgaaggaagaagtatctcggtatgtaaacttctatcagcagggaagaaaatgacggtacctgactaagaagccccggctaactacgtgccagcagccgcggtaatacgtagggggcaagcgttatccggatttactgggtgtaaagggagcgtagacggaagagcaagtctgatgtgaaaggctggggcttaaccccaggactgcattggaaactgttgttctagagtgccggagaggtaagcggaattcctagtgtagcggtgaaatgcgtagatattaggaggaacaccagtggcgaaggcggcttactggacggtaactgacgttgaggctcgaaagcgtggggagcaaacaggattagataccctggtagtccacgccgtaaacgatgaatactaggtgtcgggtggcaaagccattcggtgccgcagcaaacgcaataagtattccacctggggagtacgttcgcaagaatgaaactcaaaggaattgacggggacccgcacaagcggtggagcatgtggtttaattcgaagcaacgcgaagaaccttaccaagtcttgacctccctttgaccgtcccgtagggggttattcccttcggggcagaggagacaggtggtgcatggttgtcgtcagctcgtgtcgtgagatgttgggttaagtcccgcaacgagcgcaacccttatccttagtagccagcacatgatggtgggcactctagggagactgccggggataacccggaggaaggcggggacgacgtcaaatcatcatgccccttatgatttgggctacacacgtgctacaatggcgtaaacaaagggaagcgagacagcgatgttgagcgaatcccaaaaataacgtcccagttcggactgcagtctgcaactcgactgcacgaagctggaatcgctagtaatcgcggatcagaatgccgcggtgaatacgttcccgggtcttgtacacaccgcccgtcacaccatgggagtcagtaacgcccgaagtcagtgacctaaccgaaaggaagga

SEQ ID NO: 40 - DNA, 1364 bp, Artificial Sequence
  STR00108.1 Collinsella_aerofaciens_strain_JCM_10188_16S_ribosomal_RNA
  misc_feature (9)..(9): n is a, c, g, or t
  misc_feature (37)..(37): n is a, c, g, or t
taacggaanttttcggatggaagttgaattgactgantggcggacgggtgagtaacgcgtgggtaacctgccttgtactgggggacaacagttagaaatgactgctaataccgcataagcgcacagtatcgcatgatacagtgtgaaaaactccggtggtacaagatggacccgcgtctgattagctagttggtaaggtaacggcttaccaaggcgacgatcagtagccgacctgagagggtgaccggccacattgggactgagacacggcccaaactcctacgggaggcagcagtggggaatattgcacaatgggcgaaagcctgatgcagcgacgccgcgtgagtgaagaagtatttcggtatgtaaagctctatcagcagggaagaaaatgacggtacctgactaagaagccccggctaactacgtgccagcagccgcggtaatacgtagggggcaagcgttatccggatttactgggtgtaaagggagcgtagacggtaaagcaagtctgaagtgaaagcccgcggctcaactgcgggactgctttggaaactgtttaactggagtgtcggagaggtaagtggaattcctagtgtagcggtgaaatgcgtagatattaggaggaacaccagtggcgaaggcgacttactggacgataactgacgttgaggctcgaaagcgtggggagcaaacaggattagataccctggtagtccacgccgtaaacgatgaatactaggtgttggggagcaaagctcttcggtgccgtcgcaaacgcagtaagtattccacctggggagtacgttcgcaagaatgaaactcaaaggaattgacggggacccgcacaagcggtggagcatgtggtttaattcgaagcaacgcgaagaaccttaccgggtcttgacatcgatccgagggggtagacggtaccccttcccttcggggcggacacgcgggtcgatgcatggttgtcgtcagctcgtgtcgtgagatgttgggttaagtcccgcaacgagcgcaacccttattctaagtagccagcggttcggccgggaactcttgggagactgccagggataacctggaggaaggtggggatgacgtcaaatcatcatgccccttatgatctgggctacacacgtgctacaatggcgtaaacaaagagaagcaagaccgcgaggtggagcaaatctcaaaaataacgtctcagttcggactgcaggctgcaactcgcctgcacgaagctggaatcgctagtaatcgcgaatcagaatgtcgcggtgaatacgttcccgggtcttgtacacaccgcccgtcacaccatgggagtcagtaacgcccgaagtcagtgacccaaccgc

SEQ ID NO: 41 - DNA, 1372 bp, Artificial Sequence
  STR00106.1 Collinsella_aerofaciens_strain_JCM_10188_16S_ribosomal_RNA
cgcttccgcctgattttcttcggagatgaaggcggctgcgactgagtggcggacgggtgagtaacgcgtgggcaacctgccttgcactgggggataacagccagaaatggctgctaataccgcataagaccgaagcgccgcatggcgctgcggccaaagccccggcggtgcaagatgggcccgcgtctgattaggtagttggcggggtaacggcccaccaagccgacgatcagtagccgacctgagagggtgaccggccacattgggactgagacacggcccagactcctacgggaggcagcagtggggaatattgcacaatgggggaaaccctgatgcagcgacgccgcgtgaaggatgaagtatttcggtatgtaaactttatcagcagggagaagatgacggtacctgactaagaagccccggctaactacgtgccagcagccgcggtaatacgtagggggcaagcgttatccggatttactgggtgtaaagggagcgtagacggcgatgcaagccagatgtgaaagcccggggctcaaccccgggactgcatttggaactgcgtggctggagtgtcggagaggcaggcggaattcctagtgtagcggtgaaatgcgtagatattaggaggaacaccagtggcgaaggcggcctgctggacgatgactgacgttgaggctcgaaagcgtggggagcaaacaggattagataccctggtagtccacgccgtaaacgatgactactaggtgtcgggtggcaaggccattcggtgccgcagcaaacgcaataagtagtccacctggggagtacgttcgcaagaatgaaactcaaaggaattgacggggacccgcacaagcggtggagcatgtggtttaattcgaagcaacgcgaagaaccttacctgatcttgacatcccgatgccaaagcgcgtaacgcgctctttcttcggaacatcggtgacaggtggtgcatggttgtcgtcagctcgtgtcgtgagatgttgggttaagtcccgcaacgagcgcaacccctatcttcagtagccagcatttcggatgggcactctggagagactgccagggacaacctggaggaaggtggggatgacgtcaaatcatcatgccccttatgaccagggctacacacgtgctacaatggcgtaaacaaagggaggcgaacccgcgagggtgggcaaatcccaaaaataacgtctcagttcggattgtagtctgcaactcgactacatgaagctggaatcgctagtaatcgcgaatcagaatgtcgcggtgaatacgttcccgggtcttgtacacaccgcccgtcacaccatgggagtcagtaacgcccgaagccggtgacccaacccgc

SEQ ID NO: 42 - DNA, 1382 bp, Artificial Sequence
  STR00105.7 Collinsella_aerofaciens_strain_JCM_10188_16S_ribosomal_RNA
cgagcgaagcacttaagtctgattcttcggatgaagacttttgtgactgagcggcggacgggtgagtaacgcgtgggtaacctgcctcatacagggggataacagttagaaatgactgctaataccgcataagaccacggtaccgcatggtacagtggtaaaaactccggtggtatgagatggacccgcgtctgattaggtagttggtggggtaacggcctaccaagccgacgatcagtagccgacctgagagggtgaccggccacattgggactgagacacggcccagactcctacgggaggcagcagtggggaatattgcacaatggaggaaactctgatgcagcgacgccgcgtgaaggatgaagtatttcggtatgtaaacttctatcagcaggaagaaaatgacggtacctgctaagaagccccggctaactacgtgccagcagccgcggtaatacgtagggggcaagcgttatccggatttactgggtgtaaagggagcgtagacggcacggcaagccagatgtgaaagcccggggctcaaccccgggactgcatttggaactgctgagctagagtgtcggagaggcaagtggaattcctagtgtagcggtgaaatgcgtagatattaggaggaacaccagtggcgaaggcggcttgctggacgatgactgacgttgaggctcgaaagcgtggggagcaaacaggattagataccctggtagtccacgccgtaaacgatgactgctaggtgtcgggtggcaaagccattcggtgccgcagctaacgcaataagcagtccacctggggagtacgttcgcaagaatgaaactcaaaggaattgacggggacccgcacaagcggtggagcatgtggtttaattcgaagcaacgcgaagaaccttacctgatcttgacatcccgatgaccgcttcgtaatgtaagcttttcttcggaacatcggtgacaggtggtgcatggcggtcgtcagctcgtgtcgtgagatgttgggttaagtcccgcaacgagcgcaacccctatcttcagtagccagcaggttaagctgggcactctggagagactgccagggataacctggaggaaggtggggatgacgtcaaatcatcatgccccttatgaccagggctacacacgtgctacaatggcgtaaacaaagagaagcgaactcgcgagggtaagcaaatctcaaaaataacgtctcagttcggattgtagtctgcaactcgactacatgaagctggaatcgctagtaatcgcagatcagaatgctgcggtgaatacgttcccgggtcttgtacacaccgcccgtcacaccatgggagtcagtaacgcccgaagtcagtgacccaaccgtaagga

SEQ ID NO: 43 - DNA, 1355 bp, Artificial Sequence
  STR00104.1 Collinsella_aerofaciens_strain_JCM_10188_16S_ribosomal_RNA
  misc_feature (924)..(924): n is a, c, g, or t
  misc_feature (977)..(977): n is a, c, g, or t
agttttcggatggaatcggtataacttagtggcggacgggtgagtaacgcgtgggaaacctgccctgtaccgggggataacacttagaaatgggtgctaataccgcataagcgcacggaaccgcatggttgtgtgtgaaaaactccggtggtacaggatggtcccgcgtctgattagccagttggcagggtaacggcctaccaaagcgacgatcagtagccggcctgagagggtgaacggccacattgggactgagacacggcccaaactcctacgggaggcagcagtggggaatattgcacaatgggggaaaccctgatgcagcgacgccgcgtgagtgaagaagtatttcggtatgtaaagctctatcagcagggaagaaaatgacggtacctgactaagaagccccggctaactacgtgccagcagccgcggtaatacgtagggggcaagcgttatccggatttactgggtgtaaagggagcgtagacggcatggcaagccagatgtgaaaacccagggctcaaccttgggattgcatttggaactgcaggctggagtgcaggagaggtaagcggaattcctagtgtagcggtgaaatgcgtagatattaggaggaacaccagtggcgaaggcggcttactggactgtaactgacgttgaggctcgaaagcgtggggagcaaacaggattagataccctggtagtccacgcggtaaacgatgattgctaggtgtaggtgggtatggacccatcggtgccgcagctaacgcaataagcaatccacctggggagtacgttcgcaagaatgaaactcaaaggaattgacggggacccgcacaagcggtggagcatgtggtttaattcgaagcaacgcgaagaaccttaccaagtcttgacatccccggagagtagacggcaaancaagccagatttgaaaaccgggggatcggccttgggatggcattgggagctgncagcctggggtgtaggataggggagcggaattagcgcaacccttattcttagtagccagcaggtaaagctgggcactctaaggagactgccggggataacccggaggaaggcggggatgacgtcaaatcatcatgccccttatgatttgggctacacacgtgctacaatggcgtaaacaaagggaagcgagacagtgatgtggagcaaatcccagaaataacgtctcagttcggattgtagtctgcaactcgactacatgaagctggaatcgctagtaatcgcgaatcagcatgtcgcggtgaatacgttcccgggtcttgtacacaccgcccgtcacaccatgggagttggaaatgcccgaagtctgtgacctaacc

SEQ ID NO: 44 - DNA, 1319 bp, Artificial Sequence
  STR00107.5 Collinsella_aerofaciens_strain_JCM_10188_16S_ribosomal_RNA
  misc_feature (27)..(27): n is a, c, g, or t
  misc_feature (250)..(250): n is a, c, g, or t
ggatggattcctggttgagtgagtggnggacgggtgagtaacgcgtggataacctgcctcacactgggggataacagttaaaagtgggtgctaataccgcataagcgcacagtaccgcgtggtacggtgtgaaaaacccgggtggtgtgagatggatccgcgtctgattacccaggtgggggggtagcggccccccaaagcgacgatcagtacccgacctgagagggtgaccggccattttgggactganacacggcccaaactcctacgggaggcagcagtggggaatattgcacagtgggcggaaccctgatgcagcgaccccgcgtgagtgaaaaaatatctcggtatgtaaagctctatcagcggggaaaaaaatgacggcacctgactaaaaacccccggctaactacgtccccgggaggggatcgatttactgggtgtaaagggagcgtaacggcacgcagtctggagtgaaagcccggggcccaaccccgggactgctttgaaactgtgctgctggagtgcagagaggtaagtggaattcctagtgtagcggtgaatgcgtaatattagagaacaccagtggcaagcgcttactggactgtactgacttgagctcgaaagcgtggggagcaaacaggattagataccctggtagtccacgccgtaaacgatgaatgctaggtgtcggggggcaaagcccttcggtgccgccgctaacgcaataagcattccacctggggagtacgttcgcaagaatgaaactcaaaggaattgacggggacccgcacaagcggtggagcatgtggtttaattcgaagcaacgcgaagaaccttaccaagtcttgacatccccctgaccggcgcgtaacggtgcccttccttcgggacaggggagacaggtggtgcatggttgtcgtcagctcgtgtcgtgagatgttgggttaagtcccgcaacgagcgcaacccttatccttagtagccagcacgtcgtggtgggcactctagggagactgccagggataacctggaggaaggtggggatgacgtcaaatcatcatgccccttatgatttgggctacacacgtgctacaatggcgtaaacaaagggaggcgaccctgcgaaggtaagcaaatcccaaaaataacgtcccagttcggactgtagtctgcaacccgactacacgaagctggaatcgctagtaatcgcggatcagaatgccgcggtgaatacgttcccgggtcttgtacacaccgcccgtcacaccatgggagtcagcaacgcccgaagtcagtgacccaaccttaacaggagg

SEQ ID NO: 45 - DNA, 1372 bp, Artificial Sequence
  STR00109.1 Collinsella_aerofaciens_strain_JCM_10188_16S_ribosomal_RNA
  misc_feature (47)..(47): n is a, c, g, or t
cggagcacccctgacggagttttcggacaacgaaagggaatgcttantggcggacgggtgagtaacgcgtgagtaacctgccttggagtggggaataacagccggaaacggctgctaataccgcatgatgtatctggatcgcatggttctggataccaaagatttatcgctctgagatggactcgcgtctgattagctagttggtgaggtaatggctcaccaaggcgacgatcagtagccggactgagaggttggccggccacattgggactgagacacggcccagactcctacgggaggcagcagtggggaatattgggcaatgggcgaaagcctgacccagcaacgccgcgtgaaggaagaaggccctcgggttgtaaacttcttttgtcagggacgaagcaagtgacggtacctgacgaataagccacggctaactacgtgccagcagccgcggtaatacgtaggtggcaagcgttatccggatttactgggtgtaaagggcgtgtaggcgggagtgcaagtcagatgtgaaaactatgggctcaacccatagcctgcatttgaaactgtacttcttgagtgatggagaggcaggcggaattccctgtgtagcggtgaaatgcgtagatatagggaggaacaccagtggcgaaggcggcctgctggacattaactgacgctgaggcgcgaaagcgtggggagcaaacaggattagataccctggtagtccacgccgtaaacgatggatactaggtgtggggggtctgaccccctccgtgccgcagttaacacaataagtatcccacctggggagtacgatcgcaaggttgaaactcaaaggaattgacgggggcccgcacaagcggtggagtatgtggtttaattcgaagcaacgcgaagaaccttaccaggacttgacatcctactaacgaagcagaaatgcataagtagccgttcggggaaagtagagacaggtggtgcatggttgtcgtcagctcgtgtcgtgagatgttgggttaagtcccgcaacgagcgcaacccttattgttagttgctacgcaagagcactctagcgagactgccgttgacaaaacggaggaaggtggggacgacgtcaaatcatcatgccccttatgtcctgggccacacacgtactacaatggcggtcaacagagggaagcaaagccgcgaggtggagcaaatccctaaaagccgtcccagttcggattgcaggctgaaactcgcctgtatgaagtcggaatcgctagtaatcgcggatcagcatgccgcggtgaatacgttcccgggccttgtacacaccgcccgtcacaccatgagagtcgggaacacccgaagtccgtagcctaac

SEQ ID NO: 46 - DNA, 1362 bp, Artificial Sequence
  STR00111.1 Collinsella_aerofaciens_strain_JCM_10188_16S_ribosomal_RNA
  misc_feature (9)..(9): n is a, c, g, or t
  misc_feature (926)..(926): n is a, c, g, or t
gatgaagtntttcggatggattctgagatgactgagtggcggacgggtgagtaacacgtggataacctgcctcacactgggggacaacagttagaaatgactgctaataccgcataagcgcacagtaccgcatggtacggtgtgaaaaactccggtggtgtgagatggatccgcgtctgattagccagttggcggggtaacggcccaccaaagcgacgatcagtagccgacctgagagggtgaccggccacattgggactgagacacggcccaaactcctacgggaggcagcagtggggaatattgcacaatgggcgaaagcctgatgcagcgacgccgcgtgagtgaagaagtatttcggtatgtaaagctctatcagcagggaagataatgacggtacctgactaagaagccccggctaactacgtgccagcagccgcggtaatacgtagggggcaagcgttatccggatttactgggtgtaaagggagcgtagacggcatggcaagtctgaagtgaaaacccagggctcaaccctgggactgctttggaaactgtcaagctagagtgcaggagaggtaagtggaattcctagtgtagcggtgaaatgcgtagatattaggaggaacaccagtggcgaaggcggcttactggactgtaactgacgttgaggctcgaaagcgtggggagcaaacaggattagataccctggtagtccacgccgtaaacgatgagtgctaggtgttggggggcaaagcccttcggtgccgtcgcaaacgcaataagcactccacctggggagtacgttcgcaagaatgaaactcaaaggaattgacggggacccgcacaagcggtggagcatgtggtttaattcgaagcaacgcgaagaaccttaccaagtcttgacatcccccaggactgaagcntaggggcgctttgcatacggtcaagctagagtggagggggcatgagtgtaattgctcgtgtcgtgagatgttgggttaagtcccgcaacgagcgcaacccttatccttagtagccagcattaagatgggcactctagggagactgccagggacaacctggaggaaggtggggatgacgtcaaatcatcatgccccttatgatttgggctacacacgtgctacaatggcgtaaacaaagggaagcgaccctgcgaaggtgagcaaatctcaaaaataacgtcccagttcggactgtagtctgcaacccgactacacgaagctggaatcgctagtaatcgcgaatcagaatgtcgcggtgaatacgttcccgggtcttgtacacaccgcccgtcacaccatgggagtcagcaacgcccgaagtcagtgacccaaccga

SEQ ID NO: 47 - DNA, 1371 bp, Artificial Sequence
  STR00112.1 Collinsella_aerofaciens_strain_JCM_10188_16S_ribosomal_RNA
tcgagcgaaccacttcggtggtgagcggcgaacgggtgagtaacacgtaggttatctgcccatcagacggggacaacgattggaaacgatcgctaataccggataggacgaaagtttaaaggtgcttcggcaccactgatggatgagcctgcggcgcattagctagttggtagggtaaaggcctaccaaggcgacgatgcgtagccgacctgagagggtgaacggccacactgggactgagacacggcccagactcctacgggaggcagcagtagggaatcttcggcaatgggcgaaagcctgaccgagcaacgccgcgtgaatgatgaaggccttcgggttgtaaaattctgttataagggaagaatggctctagtaggaaatggctagagtgtgacggtaccttatgagaaagccacggctaactacgtgccagcagccgcggtaatacgtaggtggcgagcgttatccggaattattgggcgtaaagagcgcgcaggtggttgattaagtctgatgtgaaagcccacggcttaaccgtggagggtcattggaaactggtcaacttgagtgcagaagagggaagtggaattccatgtgtagcggtgaaatgcgtagagatatggaggaacaccagtggcgaaggcggcttcctggtctgtaactgacactgaggcgcgaaagcgtggggagcaaacaggattagataccctggtagtccacgccgtaaacgatgagtgctaagtgttgggggtcgaacctcagtgctgaagttaacgcattaagcactccgcctggggagtacggtcgcaagactgaaactcaaaggaattgacggggacccgcacaagcggtggagcatgtggtttaattcgaagcaacgcgaagaaccttaccaggtcttgacataccagtgaccgtcctagagataggattttcccttcggggacgatggatacaggtggtgcatgggggtcgtcagctcgtggcgtgagatgttgggttaagtcccgcaacgagcgcaacccctgtcgttagttgccagcattcagttggggactctaacgagactgccagtgacaaactggaggaaggtggggatgacgtcaaatcatcatgccccttatgacctgggctacacacgtgctacaatggttggtacaaagagaagcgaagcggtgacgtggagcaaacctcataaagccaatctcagttcggattgtaggctgcaactcgcctacatgaagttggaatcgctagtaatcgcgaatcagcatgtcgcggtgaatacgttcccgggtcttgtacacaccgcccgtcacaccacgagagtttacaacacccgaagtcagtggcctaaccgcaaggagg

SEQ ID NO: 48 - DNA, 1371 bp, Artificial Sequence
  STR00116.1 Collinsella_aerofaciens_strain_JCM_10188_16S_ribosomal_RNA
  misc_feature (1327)..(1327): n is a, c, g, or t
gaagcaccttgacggatttcttcggattgaagccttggtgactgagcggcggacgggtgagtaacgcgtgggtaacctgcctcatacagggggataacagttggaaacggctgctaataccgcataagcgcacagtaccgcatggtacggtgtgaaaaactccggtggtatgagatggacccgcgtctgattaggtagttggtggggtaacggcctaccaagccgacgatcagtagccgacctgagagggtgaccggccacattgggactgagacacggcccaaactcctacgggaggcagcagtggggaatattgcacaatgggggaaaccctgatgcagcgacgccgcgtgagcgatgaagtatttcggtatgtaaagctctatcagcagggaagaaaatgacggtacctgactaagaagccccggctaactacgtgccagcagccgcggtaatacgtagggggcaagcgttatccggatttactgggtgtaaagggagcgtagacggcatggcaagccagatgtgaaagcccggggctcaaccccgggactgcatttggaactgtcaggctagagtgtcggagaggaaagcggaattcctagtgtagcggtgaaatgcgtagatattaggaggaacaccagtggcgaaggcggctttctggacgatgactgacgttgaggctcgaaagcgtggggagcaaacaggattagataccctggtagtccacgccgtaaacgatgaatactaggtgtcgggtggcaaagccattcggtgccgcagcaaacgcaataagtattccacctggggagtacgttcgcaagaatgaaactcaaaggaattgacggggacccgcacaagcggtggagcatgtggtttaattcgaagcaacgcgaagaaccttacctggtcttgacatccctctgaccgctctttaatcggagctttccttcgggacagaggagacaggtggtgcatggttgtcgtcagctcgtgtcgtgagatgttgggttaagtcccgcaacgagcgcaacccctatctttagtagccagcattttggatgggcactctagagagactgccagggataacctggaggaaggtggggatgacgtcaaatcatcatgccccttatgaccagggctacacacgtgctacaatggcgtaaacaaagggaagcgagcccgcgagggggagcaaatcccaaaaataacgtctcagttcggattgtagtctgcaactcgactacatgaagctggaatcgctagtaatcgcgaatcagaatgtcgcggtgaatacgttcccgggtcttgtacacaccgcccntcacaccatgggagtcagtaacgcccgaagtcagtgacccaacc

SEQ ID NO: 49 - DNA, 1363 bp, Artificial Sequence
  STR00115.1 Collinsella_aerofaciens_strain_JCM_10188_16S_ribosomal_RNA
tcttcggattgaagtctttgtgactgagcggcggacgggtgagtaacgcgtgggtaacctgcctcatacagggggataacagttagaaatgactgctaataccgcataagcgcacaggaccgcatggtctggtgtgaaaaactccggtggtatgagatggacccgcgtctgattagctagttggaggggtaacggcccaccaaggcgacgatcagtagccggcctgagagggtgaacggccacattgggactgagacacggcccagactcctacgggaggcagcagtggggaatattgcacaatgggggaaaccctgatgcagcgacgccgcgtgaaggaagaagtatctcggtatgtaaacttctatcagcagggaagaaaatgacggtacctgactaagaagccccggctaactacgtgccagcagccgcggtaatacgtagggggcaagcgttatccggatttactgggtgtaaagggagcgtagacggaagagcaagtctgatgtgaaaggctggggcttaaccccaggactgcattggaaactgttgttctagagtgccggagaggtaagcggaattcctagtgtagcggtgaaatgcgtagatattaggaggaacaccagtggcgaaggcggcttactggacggtaactgacgttgaggctcgaaagcgtggggagcaaacaggattagataccctggtagtccacgccgtaaacgatgaatactaggtgtcgggtggcaaagccattcggtgccgcagcaaacgcaataagtattccacctggggagtacgttcgcaagaatgaaactcaaaggaattgacggggacccgcacaagcggtggagcatgtggtttaattcgaagcaacgcgaagaaccttacctagtcttgacgtccctctgaccgtcccgtaacggggacttcccttcggggcagaggagacaggtggtgcatggttgtcgtcagctcgtgtcgtgagatgttgggttaagtcccgcaacgagcgcaacccttatccttagtagccagcacatgatggtgggcactctagggagactgccggggataacccggaggaaggcggggacgacgtcaaatcatcatgccccttatgatttgggctacacacgtgctacaatggcgtaaacaaagggaagcgagacagcgatgttgagcgaatcccaaaaataacgtcccagttcggactgcagtctgcaactcgactgcacgaagctggaatcgctagtaatcgcggatcagaatgccgcggtgaatacgttcccgggtcttgtacacaccgcccgtcacaccatgggagtcagtaacgcccgaagtcagtgacctaaccgaaaggaag

SEQ ID NO: 50 - DNA, 1283 bp, Artificial Sequence
  STR00113.1 Collinsella_aerofaciens_strain_JCM_10188_16S_ribosomal_RNA
  misc_feature (1115)..(1116): n is a, c, g, or t
aatccacctgtaacagggggataacccggagaaatccggactaataccccataatatgggcgctccgcatggagagcccattaaagagagcaattttggttacagacgagcatgcgctccattagccagttggcggggtaacggcccaccaaagcgacgatggataggggttctgagaggaaggtcccccacattggaactgagacacggtccaaactcctacgggaggcagcagtgaggaatattggtcaatggtcggcagactgaaccagccaagtcgcgtgagggaagacggccctacgggttgtaaacctcttttgtcggagagtaaagtacgctacgtgtagtgtattgcaagtatccgaagaaaaagcatcggctaactccgtgccagcagccgcggtaatacggaggatgcaagcgttatccggatttattgggtttaaagggtgcgtaggcggcacgccaagtcagcggtgaaatttccgggctcaacccggagtgtgccgttgaaactggcgagctagagtacacaagaggcaggcggaatgcgtggtgtagcggtgaaatgcatagatatcacgcagaccccgattgcgaaggcagcctgctagggtgaaacagacgctgaggcacgaaagcgtgggtatcgaacaggattagatacccggtagtccacgcagtaaacgatgaatactaactgtttgcgatacaatgtaagcggtacagcgaaagcgttaagtattccacctggggagtacgccggcaacggtgaaactcaaaggaattgacgggggcccgcacaagcggaggaacatgtggtttaattcgatgatacgcgaggaaccttacccgggctcaaacgcggggaaaactgcgaggtgctgcatggttgtcgtcagctcgtgccgtgaggtgtcggcttaagtgccataacgagcgcaacccctatcgacagttactaacgggtcaagccgaggactctgtcgagactgccggcgcaagccgcgaggaaggtggggatgacgtcaaatcagcacggcccttacgtccggggcgacacacgtgttacaatggcaggtacagaaggcagccagtcagcaatgacgcgcganncccgaaaacctgtctcagttcggattggagtctgcaacccgactccatgaagctggattcgctagtaatcgcgcatcagccatggcgcggtgaatacgttcccgggccttgtacacaccgcccgtcaagccatggaagccgggagtacctgaagcatgcaaccgcaa

SEQ ID NO: 51 - DNA, 1271 bp, Artificial Sequence
  STR00114.1 Collinsella_aerofaciens_strain_JCM_10188_16S_ribosomal_RNA
ctttactcggggatagcctttcgaaagaaagattaatacccgatggtataacatgacctcctggttttgttattaaagaatttcggtagaggatggggatgcgttccattaggcagttggcggggtaacggcccaccaaaccttcgatggataggggttctgagaggaaggtcccccacattggaactgagacacggtccaaactcctacgggaggcagcagtgaggaatattggtcaatgggcgagagcctgaaccagccaagtagcgtgaaggatgaccgccctatgggttgtaaacttcttttatatgggaataaagtttgccacgtgtggcattttgtatgtaccatatgaataaggatcggctaactccgtgccagcagccgcggtaatacggaggatccgagcgttatccggatttattgggtttaaagggagcgtaggtggacatgtaagtcagttgtgaaagtttgcggctcaaccgtaaaattgcagttgatactgcgtgtcttgagtacagtagaggtgggcggaattcgtggtgtagcggtgaaatgtatccgaacccgattgcgaaggcagctcactggactgcaactgacactgatgctcgaaagtgtgggtatcaaacaggattagatccctggtagtccacacagtaaacgatgaatactcgctgtttgcgatatacagtaagcggccaagcgaaagcattaagtattccacctggggagtacgccggcaacggtgaaactcaaaggaattgacgggggcccgcacaagcggaggaacatgtggtttaattcgatgatacgcgaggaaccttacccgggcttaaattgcaaatgaatatgccggaaacggcatagccgcaaggcatttgtgaagctcgtgccgtgaggtgtcggcttaagtgccataacgagcgcaacccttatcttcagttactaacaggttatgctgaggactctggagagactgccgtcgtaagatgtgaggaaggtggggatgacgtcaaatcagcacggcccttacgtccggggctacacacgtgttacaatggggggtacagaaggccgctacacagcgatgtgatgccaatccctaaagcccctctcagttcggatcgaagtctgcaacccgacttcgtgaagctggattcgctagtaatcgcgcatcagccacggcgcggtgaatacgttcccgggccttgtacacaccgcccgtcaagccatgggagccgggggtacctgaagtacgtaaccgcaag

SEQ ID NO: 52 - DNA, 1353 bp, Artificial Sequence
  STR00118.1 Collinsella_aerofaciens_strain_JCM_10188_16S_ribosomal_RNA
  misc_feature (1331)..(1331): n is a, c, g, or t
  misc_feature (1343)..(1343): n is a, c, g, or t
tcgggggaataagtgattggaaagtggcgaacgggtgagtaacgcgtgggtaacctgccctatggaaaggaatagcctcgggaaactgggagtaaagccttatattatggagagatcgcatggtcatttcatgaaaactccggtgccataggatggacccgcgtcccattagctagttggtgagataacagcccaccaaggcgacgatgggtaaccggtctgagagggcgaacggtcacactggaactgagacacggtccagactcctacgggaggcagcagtggggaatattgcgcaatgggggcaaccctgacgcagcaataccgcgtgagtgaagaaggttttcggatcgtaaagctctgttattggggaagaaaacatgacggtacccaatgaggaagtcccggctaactacgtgccacagccgcggtaatacgtaggggcaagcgttgtccggaatgactgggcgtaaagggcgcgtaggcggtctgataagtcagatgtgaaaggtaccggctcaaccggtgacgtgcatttgaaactgtcagacttgagtattggagaggcaagtggaattcctagtgtagcggtgaaatgcgtagatattaggaggaacaccagtggcgaaggcggcttgctggacaaatactgacgctgaggtgcgaaagcgtggggagcgaacaggattagataccctggtagtccacgccgtaaacgatgaatgctaggtgttggggaaactcagtgccgcagttaacacaataagcattccgcctggggagtacgaccgcaaggttgaaactcaaaggaattgacggggacccgcacaagcagcggagcatgtggtttaattcgaagcaacgcgaagaaccttaccaggtcttgacatcctctgacaatcccagagatgggacgtttccttcgggaacagagagacaggtggtgcatggttgtcgtcagctcgtgtcgtgagatgttgggttaagtcccgcaacgagcgcaacccctgcctttagttgccagcattgagttgggcactctagagggactgccgtagacaatacggaggaaggtggggatgacgtcaaatcatcatgccccttatgacctgggctacacacgtgctacaatggtctgaacagagggccgcgaaaccgcgaggtgaagcaaatcccttaaaacagatcccagttcggattgcaggctgcaactcgcctgcatgaagttggagttgctagtaatcgcggatcagaatgccgcggtgaatgcgttcccgggtcttgtacacaccgcccgtcacaccacgagagttggcaacacccgaagcctntgagagaaccgnaaggactcag

SEQ ID NO: 53 - DNA, 1373 bp, Artificial Sequence
  STR00121.1 Collinsella_aerofaciens_strain_JCM_10188_16S_ribosomal_RNA
catttaggattgaagttttcggatggatttcctatatgactgagtggcggacgggtgagtaacgcgtggggaacctgccctatacagggggataacagctggaaacggctgctaataccgcataagcgcacagaatcgcatgattcagtgtgaaaagccctggcagtataggatggtcccgcgtctgattagctggttggtgaggtaacggctcaccaaggcgacgatcagtagccggcttgagagagtgaacggccacattgggactgagacacggcccaaactcctacgggaggcagcagtggggaatattgcacaatgggggaaaccctgatgcagcgacgccgcgtgagtgaagaagtatttcggtatgtaaagctctatcagcagggaagaaaacagacggtacctgactaagaagcccggctaactacgtgccacagccgcggtaatactaggggcaagcgtttccggaattactgggtgtaaagggtgcgtaggtggcatggtaagtcagaagtgaaagcccggggcttaaccccgggactgcttttgaaactgtcatgctggagtgcaggagaggtaagcggaattcctagtgtagcggtgaaatgcgtagatattaggaggaacaccagtggcgaaggcggcttactggactgtcactgacactgatgcacgaaagcgtggggagcaaacaggattagataccctggtagtcacgccgtaaacgatgaatactaggtgtcggggccgtagaggcttcggtgccgcagcaaacgcagtaagtattccacctggggagtacgttcgcaagaatgaaactcaaaggaattgacggggacccgcacaagcggtggagcatgtggtttaattcgaagcaacgcgaagaaccttacctggtcttgacatcccaatgaccgaacaataaccaggtttttgtttcgagacattggagacaggtggtgcatggttgtcgtcagctcgtgtcgtgagatgttgggttaagtcccgcaacgagcgcaacccctatctttagtagccagcatttaagatgggcactctagagagactgccagggataacctggaggaaggtggggacgacgtcaaatcatcatgccccttatggccagggctacacacgtgctacaatggcgtaaacaaagggaagcgaagtcgtgaggcgaagcaaatcccagaaataacgtctcagttcggattgtagtctgcaactcgactacatgaagctggaatcgctagtaatcgtgaatcagaatgtcacggtgaatacgttcccgggtcttgtacacaccgcccgtcacaccatgggagtcagtaacgcccgaagtcagtgacccaaccgcaaggagg

SEQ ID NO: 54 - DNA, 1292 bp, Artificial Sequence
  STR00120.1 Collinsella_aerofaciens_strain_JCM_10188_16S_ribosomal_RNA
  misc_feature (24)..(33): n is a, c, g, or t
  misc_feature (35)..(35): n is a, c, g, or t
  misc_feature (70)..(71): n is a, c, g, or t
  misc_feature (73)..(74): n is a, c, g, or t
  misc_feature (981)..(981): n is a, c, g, or t
  misc_feature (1266)..(1277): n is a, c, g, or t
gcttggtggtgagagtggcgaacnnnnnnnnnngngtgaccgacctgccccatacaccggaatagctccnntnnaacgggtggtaatgccggatgctccagttgatcgcatggtcttctgggaaagctttcgcggtatgggatggggtcgcgtcctatcagcttgacggcggggtaacggcccaccgtggcttcgacgggtagccggcctgagagggcgaccggccacattgggactgagatacggcccagactcctacgggaggcagcagtggggaatattgcacaatgggcgcaagcctgatgcagcgacgccgcgtgagggatggaggccttcgggttgtaaacctcttttatcggggagcaagcgagagtgagtttacccgttgaataagcaccggctaactacgtgccagcagccgcggtaatacgtagggtgcaagcgttatccggaattattgggcgtaaagggctcgtaggcggttcgtcgcgtccggtgtgaaagtccatcgcttaacggtggatccgcgccgggtacgggcgggcttgagtgcggtaggggagactggaattcccggtgtaacggtggaatgtgtagatatcgggaagaacaccaatggcgaaggcaggttctgggccgttactgacgctgaggagcgaaagcgtggggagcgaacaggattagataccctggtagtccacgccgtaaacggtggatgctggatgtggggccgttccacgggttccgtgtcggagctaacgcgttaagcatcccgcctggggagtacggccgcaaggctaaaactcaagaaatgacgggggcccgcacaagcggcggagcatgcggattattcgatgcacgcgaagaaccttacctgggcttgacatgttcccgacggcgtaagatacgctcccttggggggggtgccgcgtgtcgtgagatgttgggttaagtcccgcaacgagcgcaaccctcgcccgntgttgccagcggattatgccgggaactcacgggggaccgccggggttaactcggaggaaggtggggatgacgtcagatcatcatgccccttacgtccagggcttcacgcatgctacaatggccggtacaacgggatgcgacgcggcgacgcggagcggatccctgaaaaccggtctcagttcggatcgcagtctgcaactcgactgcgtgaaggcggagtcgctagtaatcgcgaatcagcaacgtcgcggtgaatgcgttcccgggccttgtacacaccgcccnnnnnnnnnnnnaaagtgggcagcacc

SEQ ID NO: 55 - DNA, 1343 bp, Artificial Sequence
  STR00125 Collinsella_aerofaciens_strain_JCM_10188_16S_ribosomal_RNA
  misc_feature (922)..(922): n is a, c, g, or t
  misc_feature (924)..(924): n is a, c, g, or t
  misc_feature (945)..(945): n is a, c, g, or t
  misc_feature (954)..(954): n is a, c, g, or t
  misc_feature (957)..(957): n is a, c, g, or t
  misc_feature (977)..(977): n is a, c, g, or t
  misc_feature (983)..(983): n is a, c, g, or t
  misc_feature (1108)..(1108): n is a, c, g, or t
gggcagcattttagtttgcttgcaaactgaagatggcgaccggcgcacgggtgagtaacacgtatccaacctgccgataactccggaatagcctttcgaaagaaagattaataccggatggcatacgaatatcgcatgatatttttattaaagaatttcggttatcgatggggatgcgttccattagtttgttggcggggtaacggcccaccaagactacgatggataggggttctgagaggaaggtcccccacattggaactgagacacggtccaaactcctacgggaggcagcagtgaggaatattggtcaatgggcgagagcctgaaccagccaagtagcgtgaaggatgaaggctctatgggtcgtaaacttcttttatatgggaataaagttttccacgtgtggaattttgtatgtaccatatgaataaggatcggctaactccgtgccagcagccgcggtaatacggaggatccgagcgttatccggatttattgggtttaaagggagcgtaggtggattgttaagtcagttgtgaaagtttgcggctcaaccgtaaaattgcagttgaaactggcagtcttgagtacagtagaggtgggcggaattcgtgggtacgaagtagatgaaatccgattggaagcagctcactagactgtcactgcactgatgctgaaagtgtgggtatcaacaggattagataccctggtagtcccagtaaacgatgaatactcgctgtttgcgatatcagtaagcggccaagcgaaacattaagtattccactggggagtacgccggcacggtgaaactcaaaggaattgacgggggcccgccaagcggaggaacatgtggtttaattcgatgatcgcgaggaaccttacccgggcttaaattgcacagaatatattaacagtatancngtaaggctgttgtgaaggtgntgcatggtnttngtcagttcgtcccgtgaggnttcggnttaagtgccataacgagcgcaacctttatctttagttattaccaggttatgttgaggattttagagagactgccttcgtaagatgtgaggaaggtggggaggacgtcaaatcagcacggcccttncgtccggggttccccacgtgttccaatggggggtacagaaggcggctacctggtgacaggatgctaatcccaaaaacctctctcagttcggatcgaagtctgcaacccgacttcgtgaagctggattcgctagtaatcgcgcatcagccatggcgcggtgaatacgttcccgggccttgtacacaccgcccgtcaagccatgaaagccgggggtacctgaagtacgtaaccgcaa

SEQ ID NO: 56 - DNA, 1372 bp, Artificial Sequence
  STR00124.1 Collinsella_aerofaciens_strain_JCM_10188_16S_ribosomal_RNA
gaggggcagcatgaacttagcttgctaagtttgatggcgaccggcgcacgggtgagtaacacgtatccaacctgccgatgactcggggatagcctttcgaaagaaagattaatacccgatggcatagttcttccgcatggtggaactattaaagaatttcggtcatcgatggggatgcgttccattaggttgttggcggggtaacggcccaccaagccttcgatggataggggttctgagaggaaggtcccccacattggaactgagacacggtccaaactcctacgggaggcagcagtgaggaatattggtcaatggacgagagtctgaaccagccaagtagcgtgaaggatgactgccctatgggttgtaaacttcttttatacgggaataaagtgaggcacgtgtgcctttttgtatgtaccgtatgaataaggatcggctaactccgtgccagcagccgcggtaatacggaggatccgagcgttatccggatttattgggtttaaagggagcgtaggcggacgcttaagtcagttgtgaaagtttgcggctcaaccgtaaaattgcagttgatactgggtgtcttgagtacagtagaggcaggcggaattcgtggtgtagcggtgaaatgcttagatatcacgaagaactccgattgcgaaggcagcctgctggactgtaactgacgctgatgctcgaaagtgtgggtatcaaacaggattagataccctggtagtccacacagtaaacgatgaatactcgctgtttgcgatatacagtaagcggccaagcgaaagcgttaagtattccacctggggagtacgccggcaacggtgaaactcaaaggaattgacgggggcccgcacaagcggaggaacatgtggtttaattcgatgatacgcgaggaaccttacccgggcttgaattgcaactgaatgatgtgggagcgtaggcgcacgatgaagtcagttatggaagtttgcggctcaaccgtgctcgtgccgtgaggtgtcggcttaagtgccataacgagcgcaacccttatcgatagttaccatcaggtgatgctggggactctgtcgagactgccgtcgtaagatgtgaggaaggtggggatgacgtcaaatcagcacggcccttacgtccggggctacacacgtgttacaatggggggtacagaaggcagctacacggcgacgtgatgctaatcccgaaagcctctctcagttcggattggagtctgcaacccgactccatgaagctggattcgctagtaatcgcgcatcagccacggcgcggtgaatacgttcccgggccttgtacacaccgcccgtcaagccatgaaagccgggggtacctgaagtgcgta

SEQ ID NO: 57 - DNA, 1373 bp, Artificial Sequence
  STR00126.1 Collinsella_aerofaciens_strain_JCM_10188_16S_ribosomal_RNA
gggcagcatggtcttagcttgctaaggccgatggcgaccggcgcacgggtgagtaacacgtatccaacctgccgtctactcttggacagccttctgaaaggaagattaatacaagatggcatcatgagtccgcatgttcacatgattaaaggtattccggtagacgatggggatgcgttccattagatagtaggcggggtaacggcccacctagtcttcgatggataggggttctgagaggaaggtcccccacattggaactgagacacggtccaaactcctacgggaggcagcagtgaggaatattggtcaatgggcgagagcctgaaccagccaagtagcgtgaaggatgactgccctatgggttgtaaacttcttttataaaggaataaagtcgggtatggatacccgtttgcatgtactttatgaataaggatcggctaactccgtgccagcagccgtaatacggaggatccgagcgttatccggatttattgggtttaaagggagcgtagatggatgtttaagtcagttgtgaaagtttgcggctcaaccgtaaaattgcagttgatactggatatcttgagtgcagttgaggcaggcggaattcgtggtgtagcggtgaaatgcttagatatcacgaagaactccgattgcgaaggcagcctgctaagctgcaactgacattgaggctcgaaagtgtgggtatcaaacaggattagataccctggtagtccacacggtaaacgatgaatactcgctgtttgcgatatacgcaagcggccaagcgaaagcgttaagtattccacctggggagtacgccggcaacggtgaaactcaaaggaattgacgggggcccgcacaagcggaggaacatgtggtttaattcgatgatacgcgaggaaccttacccgggcttaaattgcagatgaattacggtgaaagccgtaagccgcaaggcatctgtgaaggtgctgcatggttgtcgtcagctcgtgccgtgaggtgtcggcttaagtgccataacgagcgcaacccttgttgtcagttactaacaggttccgctgaggactctgacaagactgccatcgtaagatgtgaggaaggtggggatgacgtcaaatcagcacggcccttacgtccggggctacacacgtgttacaatggggggtacagagggccgctaccacgcgagtggatgccaatccccaaaacctctctcagttcggactggagtctgcaacccgactccacgaagctggattcgctagtaatcgcgcatcagccacggcgcggtgaatacgttcccgggccttgtacacaccgcccgtcaagccatgggagccgggggtacctgaagtgcgtaaccgcga

SEQ ID NO: 58 - DNA, 1332 bp, Artificial Sequence
  STR00123.1 Collinsella_aerofaciens_strain_JCM_10188_16S_ribosomal_RNA
tcgaacgcgttggcccaattgattgatggtgcttgcacctgattgattttggtcgccaacgagtggcggacgggtgagtaacacgtaggtaacctgcccagaagcgggggacaacatttggaaacagatgctaataccgcataacagcgttgttcgcatgaacaacgcttaaaagatggcttctcgctatcacttctggatggacctgcggtgcattagcttgttggtggggtaacggcctaccaaggcgatgatgcatagccgagttgagagactgatcggccacaatgggactgagacacggcccatactcctacgggaggcagcagtagggaatcttccacaatgggcgcaagcctgatggagcaacaccgcgtgagtgaagaagggtttcggctcgtaaagctctgttgttaaagaagaacacgtatgagagtaactgttcatacgttgacggtatttaaccagaaagtcacggctaactacgtgccagcagccgcggaaggagtttccggatttggcaaggtttcagaactgtaccggagaagtgcatcggaaactggataacttgagtgcagaagagggtagtggaactccatgtgtagcggtggaatgcgtagatatatggaagaacaccagtggcgaaggcggctacctggtctgcaactgacgctgagactcgaaagcatgggtagcgaacaggattagataccctggtagtccatgccgtaaacgatgagtgctaggtgttggagggtttccgcccttcagtgccggagctaacgcattaagcactccgcctggggagtacgacgcaaggttgaaactcaaaggaatgacgggggcccgcacaagcggggagcatgtggtttaattcgaagctacgcgaagactcgtttgcgccaaccctagagatagggcgtttccttcgggaacgcaatgacaggtggtgcatggtcgtcgtcagctcgtgtcgtgagatgttgggttaagtcccgcaacgagcgcaacccttgttactagttgccagcattaagttgggcactctagtgagactgccggtgacaaaccggaggaaggtggggacgacgtcagatcatcatgccccttatgacctgggctacacacgtgctacaatggacggtacaacgagtcgcgaactcgcgagggcaagcaaatctcttaaaaccgttctcagttcggactgcaggctgcaactcgcctgcacgaagtcggaatcgctagtaatcgcggatcagcatgccgcggtgaatacgttcccgggccttgtacacaccgcccgtcacaccatgagagtttgtaacacccaaa

SEQ ID NO: 59 - DNA, 1383 bp, Artificial Sequence
  STR00117.1 Collinsella_aerofaciens_strain_JCM_10188_16S_ribosomal_RNA
  misc_feature (13)..(13): n is a, c, g, or t
  misc_feature (17)..(19): n is a, c, g, or t
  misc_feature (45)..(45): n is a, c, g, or t
tcgagcgaagcancttnnncggatttcttcggattgaagtttttngtgactcgagcggcggacgggtgagtaacgcgtgggtaacctgcctcatacagggggataacagttagaaatggctgctaataccgcataagcgcacaggaccgcatggtctggtgtgaaaaactccggtggtatgagatggacccgcgtctgattagctagttggaggggtaacggcccaccaaggcgacgatcagtagccggcctgagagggtgaacggccacattgggactgagacacggcccagactcctacgggaggcagcagtggggaatattgcacaatgggggaaaccctgatgcagcgacgccgcgtgaaggaagaagtatctcggtatgtaaacttctatcagcagggaagaaaatgacggtacctgactaagaagccccggctaactacgtgccagcagccgcggtaatacgtagggggcaagcgttatccggtttactgggtgtaaagggagcgtagacggaagagcaagtctgatgtgaaaggctggggcttaaccccaggactgcattggaaactgtttttctagagtgccggagaggtaagcggaattcctagtgtagcggtgaaatgcgtagatattaggaggaacaccagtggcgaaggcggcttactggacggtaactgacgttgaggctcgaaagcgtggggagcaaacaggattagataccctggtagtccacgccgtaaacgatgaatactaggtgtcgggtggcaaagccattcggtgccgcagcaaacgcaataagtattccacctggggagtacgttcgcaagaatgaaactcaaaggaattgacggggacccgcacaagcggtggagcatgtggtttaattcgaagcaacgcgaagaaccttaccaagtcttgacatccctctgaccggcccgtaacggggccttcccttcggggcagaggagacaggtggtgcatggttgtcgtcagctcgtgtcgtgagatgttgggttaagtcccgcaacgagcgcaacccctatccttagtagccagcaggtgaagctgggcactctagggagactgccggggataacccggaggaaggcggggacgacgtcaaatcatcatgccccttatgatttgggctacacacgtgctacaatggcgtaaacaaagggaagcgagacagcgatgttgagcaaatcccaaaaataacgtcccagttcggactgcagtctgcaactcgactgcacgaagctggaatcgctagtaatcgcgaatcagaatgtcgcggtgaatacgttcccgggtcttgtacacaccgcccgtcacaccatgggagtcagtaacgcccgaagtcagtgacccaacctta

SEQ ID NO: 60 - DNA, 1355 bp, Artificial Sequence
  STR00129.1 Collinsella_aerofaciens_strain_JCM_10188_16S_ribosomal_RNA
gaagctggagcttgctccggccgatttagtggcggacgggtgagtaacgcgtgggtaacctgcctcatacagggggatagcagttggaaacgactggtaaaaccgcataagcgcacggtatcgcatgatacagtgtgaaaacactccggtggtatgagatggacccgcgtctgattagctagttggtgaggtaacggcccaccaaggcgacgatcagtagccggcctgagagggtgaacggccacattgggactgagacacggcccaaactcctacgggaggcagcagtggggaatattgcacaatgggggaaaccctgatgcagcgacgccgcgtgagtgaagaagtatttcggtatgtaaagctctatcagcagggaagataatgacggtacctgactaagaagcaccggctaaatacgtgccagcagccgcggtaatacgtatggtgcaagcgttatccggatttactgggtgtaaagggtgcgtaggtggcaaggcaagtctgaagtgaaaatccggggctcaaccccggaactgctttggaaactgtttagctagagtacaggagaggtaagtggaattctagtgtagcggtgaaatgcgtagatattaggaggaacaccagtggcgaaggcgacttactggactgctactgacactgaggcacgaaagcgtggggagcaaacaggattagataccctggtagtccacgccgtaaacgatgaatactagtgttgggttccaaagggactcggtgccgtcgcaaacgcattaagtattccacctggggagtacgttcgcaagaatgaaactcaaaggaattgacggggacccgcacaagcggtggagcatgtggtttaattcgaagcaacgcgaaaaaccttaccaagtcttgacttcctgatgagggttgcttaacctgaaaatccggtgcgcaaccccggaactggttgggaaacggtttagctagctcgtgtcgtgagatgttgggttaagtcccgcaacgagcgcaacccctatttccagtagccagcagtaagatgggcactctggagagactgccggggataacccggaggaaggtggggatgacgtcaaatcatcatgccccttatgatttgggctacacacgtgctacaatggcagttacaaagagaagcaaacctgtgaaggcgagcaaacctcaaaaaggctgtctcagttcggattgtagtctgcaactcgactacatgaagctggaatcgctagtaatcgcagatcagcatgctgcggtgaatacgttcccgggtcttgtacacaccgcccgtcacaccatgggagtcaggtaacgcccgaagtcagtgacccaaccgc

SEQ ID NO: 61 - DNA, 1372 bp, Artificial Sequence
  STR00127.1 Collinsella_aerofaciens_strain_JCM_10188_16S_ribosomal_RNA
  misc_feature (47)..(54): n is a, c, g, or t
gcgaagcactttgcttagattcttcggatgaagaggattgtgactgnnnnnnnnggacgggtgagtaacgcgtgggtaacctgcctcatacagggggataacagttagaaatgactgctaataccgcataagaccacagcaccgcatggtgcgggggtaaaaactccggtggtatgagatggacccgcgtctgattagctagttggtaaggtaacggcttaccaaggcgacgatcagtagccgacctgagagggtgaccggccacattgggactgagacacggcccaaactcctacgggaggcagcagtggggaatattgcacaatgggggaaaccctgatgcagcgacgccgcgtgagcgaagaagtatttcggtatgtaaagctctatcagcagggaagaaaatgacggtacctgactaagaagcaccggctaaatacgtgccagcagccgcggtaatacgtatggtgcaagcgttatccggtttactgggtgtaaagggagcgtagacggatgggcaagttgatgtgaaaacccggggctcaaccccgggactgcattggaaactgttcatctagagtgctggagaggtaagtggaattcctagtgtagcggtgaaatgcgtagatattaggaggaacaccagtggcgaaggcggcttactggacagtaactgacgttgaggctcgaaagcgtggggagcaaacaggattagataccctggtagtccacgccgtaaacgatgactactaggtgtcgggtggcaaagccattcggtgccgcagcaaacgcaataagtagtccacctggggagtacgttcgcaagaatgaaactcaaaggaattgacggggacccgcacaagcggtggacatgtggtttaattcgaagcaacgcgaagaaccttacctgctcttgacatcccgctgaccggacggtaatgcgtccttcccttcggggcagcggagacaggtggtgcatggttgtcgtcagctcgtgtcgtgagatgttgggttaagtcccgcaacgagcgcaacccctatctttagtagccagcggccaggccgggcactctagagagactgccggggataacccggaggaaggtggggatgacgtcaaatcatcatgccccttatgagcagggctacacacgtgctacaatggcgtaaacaaagggaagcgagaccgcgaggtggagcaaatcccaaaaataacgtctcagttcggattgtagtctgcaactcgactacatgaagctggaatcgctagtaatcgcgaatcagaatgtcgcggtgaatacgttcccgggtcttgtacacaccgcccgtcacaccatgggagtcagtaacgcccgaagtcagtgacccaacc

SEQ ID NO: 62 - DNA, 1319 bp, Artificial Sequence
  STR00128.1 Collinsella_aerofaciens_strain_JCM_10188_16S_ribosomal_RNA
  misc_feature (875)..(875): n is a, c, g, or t
ggtgagtaacgcgtgggtaacctgcctcatacagggggataacggttagaaatgactgctaataccgcataagcgcacagtaccgcatggtacggtgtgaaaaactccggtggtatgagatggacccgcgtctgattagctggttggtggggtaacggcccaccaaggcgacgatcagtagccgacctgagagggtgaccggccacattgggactgagacacggcccagactcctacgggaggcagcagtgggggatattgcacaatggaggaaactctgatgcagcgacgccgcgtgagtgaagaagtatttcggtatgtaaagctctatcagcagggaagaaaatgacggtacctgactaagaagccccggctaactacgtgccagcagccgcggtaatacgtagggggcaagcgttatccggatttactgggtgtaaagggagcgtagacggcgacgcaagtctgaagtgaaatacccgggctcaacctgggaactgctttggaaactgtgttgctgagtgctggagaggtaagcggaattcctagtgtagcggtgaaatgcgtagatattaggaagaacaccagtggcgaaggcggcttactggacagtaactgacgttgaggctcgaaagcgtggggagcaaacaggattagataccctggtagtccacgccgtaaacgatgaatactaggtgttggtgagcaaagctcatcggtgccgccgcaaacgcaataagtattccacctggggagtacgttcgcaagaatgaaactcaaaggaattgacggggacccgcacaagcggtggagcatgtggtttaattcgaagcaacgcgaagaaccttaccaaatcttgacatccctctgaaaancctttaatcgggctcctccttcgggacagaggtgacaggtggtgcatggttgtcgtcagctcgtgtcgtgagatgttgggttaagtcccgcaacgagcgcaacccctattgtcagtagccagcaggtcaagctgggcactctgatgagactgccagggataacctggaggaaggtggggatgacgtcaaatcatcatgccccttatgatttgggctacacacgtgctacaatggcgtaaacaaagagaagcgagcctgcgagggggagcaaatctcaaaaataacgtctcagttcggattgtagtctgcaactcgactacatgaagctggaatcgctagtaatcgcagatcagaatgctgcggtgaatacgttcccgggtcttgtacacaccgcccgtcacaccatgggagtcggaaatgcccgaagccagtgacccaagcgaa

SEQ ID NO: 63 - DNA, 1307 bp, Artificial Sequence
  STR00131.1 Collinsella_aerofaciens_strain_JCM_10188_16S_ribosomal_RNA
  misc_feature (1297)..(1299): n is a, c, g, or t
aagaaccttcgggggaataagtgattggaaagtggcgaacgggtgagtaacgcgtgggtaacctgccctatggaaaggaatagcctcgggaaactgggagtaaagccttatattatggagagatcgcatggtcatttcatgaaaactccggtgccataggatggacccgcgtcccattagctagttggtgagataacagcccaccaaggcgacgatgggtaaccggtctgagagggcgaacggtcacactggaactgagacacggtccagactcctacgggaggcagcagtggggaatattgcgcaatgggggcaaccctgacgcagcaataccgcgtgagtgaagaaggttttcggatcgtaaagctctgttattggggaagaaaacatgacggtacccaatgaggaagtcccggctaactacgtgccagcagccgcggtaatacgtaggggacaagcgttgtccggaatgactgggcgtaaagggcgcgtaggcggtctgataagtcagatgtgaaaggtaccggctcaaccggtgacgtgcatttgaaactgtcagacttgagtattggagaggcaagtggaattcctagtgtagcggtgaaatgcgtagatattaggaggaacaccagtggcgaaggcggcttgctggacaaatactgacgctgaggtgcgaaagcgtggggagcgaacaggattagataccctggtagtccacgccgtaaacgatgaatgcttgggaactaaatccgggcagtaacaaaggaattgacggggacccgcacaagcagcggagcatgtggtttaattcgaagcaacgcgaagaaccttaccaggtcttgacatcctctgacaatcccagagatgggacgtttccttcgggaacagagagacaggtggtgcatggttgtcgtcagctcgtgtcgtgagatgttgggttaagtcccgcaacgagcgcaacccctgcctttagttgccagcattgagttgggcactctagagggactgccgtagacaatacggaggaaggtggggatgacgtcaaatcatcatgccccttatgacctgggctacacacgtgctacaatggtctgaacagagggccgcgaaaccgcgaggtgaagcaaatcccttaaaacagatcccagttcggattgcaggctgcaactcgcctgcatgaagttggagttgctagtaatcgcggatcagaatgccgcggtgaatgcgttcccgggtcttgtacacaccgcccgtcacaccacgagagttggcaacacccgaagcctgtgagagaacnnnaaggactc

SEQ ID NO: 64 - DNA, 1368 bp, Artificial Sequence
  STR00041.1 Collinsella_aerofaciens_strain_JCM_10188_16S_ribosomal_RNA
ttcttcggattgaagtttttgtgactgagtggcggacgggtgagtaacgcgtgggtaacctgcctcatacagggggataacagttagaaatgactgctaataccgcataagcgcacagtgctgcatggcacagtgtgaaaaactccggtggtatgagatggacccgcgtctgattagctagttggtggggtaacggcctaccaaggcgacgatcagtagccggcctgagagggtgaacggccacattgggactgagacacggcccaaactcctacgggaggcagcagtggggaatattgcacaatgggggaaaccctgatgcagcgacgccgcgtgagcgaagaagtatttcggtatgtaaagctctatcagcagggaagaaaatgacggtacctgactaagaagcaccggctaaatacgtgccagcagccgcggtaatacgtatggtgcaagcgttatccggatttactgggtgtaaagggagcgtagacggttgtgtaagtctgatgtgaaagcccggggctcaaccccgggactgcattggaaactatgtaactagagtgtcggagaggtaagcggaattcctagtgtagcggtgaaatgcgtagatattaggaggaacaccagtggcgaaggcggcttactggacgatcactgacgttgaggctcgaaagcgtggggagcaaacaggattagataccctggtagtccacgccgtaaacgatgactactaggtgtcggggagcaaagctcttcggtgccgcagcaaacgcaataagtagtccacctggggagtacgttcgcaagaatgaaactcaaaggaattgacggggacccgcacaagcggtggagcatgtggtttaattcgaagcaacgcgaagaaccttacctggtcttgacatcccggtgaccggcaagtaatgttgcctttccttcgggaacccggggactggattggaaactatgtaactagatcgtgtcgtgagatgttgggttaagtcccgcaacgagcgcaacccctatcttcagtagccagcatttaaggtgggcactctggagagactgccagggataacctggaggaaggtggggatgacgtcaaatcatcatgccccttatgaccagggctacacacgtgctacaatggcgtaaacaaagggaagcgaacctgtgaggggaagcaaatctcaaaaataacgtctcagttcggattgtagtctgcaactcgactacatgaagctggaatcgctagtaatcgcgaatcagcatgtcgcggtgaatacgttcccgggtcttgtacacaccgcccgtcacaccatgggagtcagtaacgcccgaagtcagtgacccaaccgtaaggagggagct

SEQ ID NO: 65 - DNA, 1391 bp, Artificial Sequence
  STR00030.1 Collinsella_aerofaciens_strain_JCM_10188_16S_ribosomal_RNA
cgaagcacttgaacggatttcttcggattgaagtttttgtgactgagcggcggacgggtgagtaacgcgtgggtaacctgcctcatacagggggataacagttagaaatggctgctaataccgcataagcgcacaggaccgcatggtctggtgtgaaaaactccggtggtatgagatggacccgcgtctgattagctagttggaggggtaacggcccaccaaggcgacgatcagtagccggcctgagagggtgaacggccacattgggactgagacacggcccagactcctacgggaggcagcagtggggaatattgcacaatgggggaaaccctgatgcagcgacgccgcgtgaaggaagaagtatctcggtatgtaaacttctatcagcagggaagaaaatgacggtacctgactaagaagccccggctaactacgtgccagcagccgcggtaatacgtagggggcaagcgttatccggatttactgggtgtaaagggagcgtagacggaagagcaatctgatgtgaaaggctggggcttaaccccaggactgcattggaaactgtttttctagagtgccggagaggtaagcggaattcctagtgtagcggtgaaatgcgtagatattaggaggaacaccagtggcgaaggcggcttactggacggtaactgacgttgaggctcgaaagcgtggggagcaaacaggattagataccctggtagtccacgccgtaaacgatgaatactaggtgtcgggtggcaaagccattcggtgccgcagcaaacgcaataagtattccacctggggagtacgttcgcaagaatgaaactcaaaggaattgacggggacccgcacaagcggtggagcatgtggtttaattcgaagcaacgcgaagaaccttaccaagtcttgacatccctctgacctgtccaggaaggggacatgccataggggcagaggagacaggtggtgcatggttgtcgtcagctcgtgtcgtgagatgttgggttaagtcccgcaacgagcgcaacccctatccttagtagccagcaggtgaagctgggcactctagggagactgccggggataacccggaggaaggcggggacgacgtcaaatcatcatgccccttatgatttgggctacacacgtgctacaatggcgtaaacaaagggaagcgagacagcgatgttgagcaaatcccaaaaataacgtcccagttcggactgcagtctgcaactcgactgcacgaagctggaatcgctagtaatcgcgaatcagaatgtcgcggtgaatacgttcccgggtcttgtacacaccgcccgtcacaccatgggagtcagtaacgcccgaagtcagtgacccaaccttataggagggagctgccg

SEQ ID NO: 66 - DNA, 1354 bp, Artificial Sequence
  STR00037.1 Collinsella_aerofaciens_strain_JCM_10188_16S_ribosomal_RNA
cgatctcttcggagagagcggcggacgggtgagtaacgcgtgggtaacctgccctgtacacacggataacataccgaaaggtatactaatacgggataacatatgaaagtcgcatggcttttgtatcaaagctccggcggtacaggatggacccgcgtctgattagctagttggtaaggtaatggcttaccaaggcaacgatcagtagccgacctgagagggtgatcggccacactggaactgagacacggtccagactcctacgggaggcagcagtggggaatattgcacaatgggcgaaagcctgatgcagcaacgccgcgtgagcgatgaagcttcgggtcgtaaagctctgtctcaaggaagataatgacggtacttgaggaggaagccccggctaactacgtgccagcagccgcggtaatacgtagggggctagcgttatccggaattactgggcgtaaagggtgcgtaggtggttttttaagtcagaagtgaaaggctacggctcaaccgtagtaagcttttgaaactagagaacttgagtgcaggagaggagagtagaattcctagtgtagcggtgaaatgcgtagatattaggaggaataccagtagcgaaggcggctctctggactgtaactgacactgaggcacgaaagcgtggggagcaaacaggattagataccctggtagtccacgccgtaaacgatgagtactaggtgtcgggggttacccccctcggtgccgcagctaacgcattaagtactccgcctgggaagtacgctcgcaagagtgaaactcaaaggaattgacggggacccgcacaagtagcggagcatgtggtttaattcgaagcaacgcgaagaaccttacctaagcttgacatcccactgacctctccctaatcggagatttcccttcggggacagtaggaataccaggagcgaagtcgtctccctgtactgtaactggctgtgaggctaagtcccgcaacgagcgcaacccttgcctttagttgccagcattaagttgggcactctagagggactgccgaggataactcggaggaaggtggggatgacgtcaaatcatcatgccccttatgcttagggctacacacgtgctacaatgggtggtacagagggttgccaagccgcgaggtggagctaatcccttaaagccattctcagttcggattgtaggctgaaactcgcctacatgaagctggagttactagtaatcgcagatcagaatgctgcggtgaatgcgttcccgggtcttgtacacaccgcccgtcacaccatggaagttgggggcgcccgaagccggttagctaaccttttaggaagcggcc

SEQ ID NO: 67 - DNA, 1386 bp, Artificial Sequence
  STR00018.1 Collinsella_aerofaciens_strain_JCM_10188_16S_ribosomal_RNA
tcgaggggcagcatgaacttagcttgctaagtttgatggcgaccggcgcacgggtgagtaacacgtatccaacctgccgatgactcggggatagcctttcgaaagaaagattaatacccgatggcatagttcttccgcatggtggaactattaaagaatttcggtcatcgatggggatgcgttccattaggttgttggcggggtaacggcccaccaagccttcgatggataggggttctgagaggaaggtcccccacattggaactgagacacggtccaaactcctacgggaggcagcagtgaggaatattggtcaatggacgagagtctgaaccagccaagtagcgtgaaggatgactgccctatgggttgtaaacttcttttatacgggaataaagtgaggcacgtgtgcctttttgtatgtaccgtatgaataaggatcggctaactccgtgccagcagccgcggtaatacggaggatccgagcgttatccggatttattgggtttaaagggagcgtaggcggacgcttaagtcagttgtgaaagtttgcggctcaaccgtaaaattgcagttgatactgggtgtcttgagtacagtagaggcaggcggaattcgtggtgtagcggtgaaatgcttagatatcacgaagaactccgattgcgaaggcagcttgctggactgtaactgacgctgatgctcgaaagtgtgggtatcaaacaggattagataccctggtagtccacacagtaaacgatgaatactcgctgtttgcgatatacagtaagcggccaagcgaaagcgttaagtattccacctggggagtacgccggcaacggtgaaactcaaaggaattgacgggggcccgcacaagcggaggaacatgtggtttaattcgatgatacgcgaggaaccttacccgggcttgaattgcaactgaatgatgtggagacatgtcagccgcaaggcagttgtgaaggtgctgcatggttgtcgtcagctcgtgccgtgaggtgtcggcttaagtgccataacgagcgcaacccttatcgatagttaccatcaggttatgctggggactctgtcgagactgccgtcgtaagatgtgaggaaggtggggatgacgtcaaatcagcacggcccttacgtccggggctacacacgtgttacaatggggggtacagaaggcagctacacggcgacgtgatgctaatcccgaaagcctctctcagttcggattggagtctgcaacccgactccatgaagctggattcgctagtaatcgcgcatcagccacggcgcggtgaatacgttcccgggccttgtacacaccgcccgtcaagccatgaaagccgggggtacctgaagtgcgtaaccgcaaggagc

SEQ ID NO: 68 - DNA, 970 bp, Artificial Sequence
  STR00017 Collinsella_aerofaciens_strain_JCM_10188_16S_ribosomal_RNA
  misc_feature (18)..(18): n is a, c, g, or t
  misc_feature (33)..(33): n is a, c, g, or t
  misc_feature (81)..(81): n is a, c, g, or t
  misc_feature (83)..(83): n is a, c, g, or t
gtgagtgtacctttcgantaagcaccggctaantacgtgccagcagccgcggtaatacgtagggtgcaagcgttatccggnanttattgggcgtaaagggctcgtaggcggttcgtcgcgtccggtgtgaaagtccatcgcttaacggtggatccgcgccgggtacgggcgggcttgagtgcggtaggggagactggaattcccggtgtaacggtggaatgtgtagatatcgggaagaacaccaatggcgaaggcaggtctctgggccgtcactgacgctgaggagcgaaagcgtggggagcgaacaggattagataccctggtagtccacgccgtaaacggtggatgctggatgtggggaccattccacggtctccgtgtcggagccaacgcgttaagcatcccgcctggggagtacggccgcaaggctaaaactcaaagaaattgacgggggcccgcacaagcggcggagcatgcggattaattcgatgcaacgcgaagaaccttacctgggcttgacatgttcccgacagccgcagagatacggtctcccttcggggcgggttcacaggtggtgcatggtcgtcgtcagctcgtgtcgtgagatgttgggttaagtcccgcaacgagcgcaaccctcgccctgtgttgccagcacgtcgtggtgggaactcacgggggaccgccggggtcaactcggaggaaggtggggatgacgtcagatcatcatgccccttacgtccagggcttcacgcatgctacaatggccggtacaacgggatgcgacctcgtgagggggagcggatcccttaaaaccggtctcagttcggattggagtctgcaacccgactccatgaaggcggagtcgctagtaatcgcggatcagcaacgccgcggtgaatgcgttcccgggccttgtacacaccgcccgtcaagtcatgaaagtgggtagcacccgaagccggtggcc

SEQ ID NO: 69 - DNA, 1364 bp, Artificial Sequence
  STR00039.1 Collinsella_aerofaciens_strain_JCM_10188_16S_ribosomal_RNA
agcacttttgcggatttcttcggattgaagcaattgtgactgagcggcggacgggtgagtaacgcgtgggtaacctgcctcatacagggggataacagttggaaacggctgctaataccgcataagcgcacagtaccgcatggtaccgtgtgaaaaactccggtggtatgagatggacccgcgtctgattagctagttggtggggtaacggcctaccaaggcgacgatcagtagccgacctgagagggtgaccggccacattgggactgagacacggcccaaactcctacgggaggcagcagtggggaatattgcacaatgggggaaaccctgatgcagcgacgccgcgtgagcatgaagtatttcggtatgtaaagctctatcagcagggaagaaaatgacggtacctgactaagaagcccggctaactacgtgccagcagccgcggtaatacgtagggggcaagcgttatccggatttactgggtgtaaagggagcgtagacggcatggcaagccagatgtgaaagcccggggctcaaccccgggactgcatttggaactgtcaggctagagtgtcggagaggaaagcggaattcctagtgtagcggtgaaatgcgtagatattaggaggaacaccagtggcgaaggcggctttctggacgatgactgacgttgaggctcgaaagcgtggggagcaaacaggattagataccctggtagtccacgccgtaaacgatgaatactaggtgtcgggtggcaaagccattcggtgccgcagcaaacgcaataagtattccacctggggagtacgttcgcaagaatgaaactcaaaggaattgacggggacccgcacaagcggtggagcatgtggtttaattcgaagcaacgcgaagaaccttacctggtcttgacatcccagtgtccgagagttaagcggaatttttcgtgtagcgatagaagacatagagattagggggaacaccagctcgtgtcgtgagatgttgggttaagtcccgcaacgagcgcaacccctatctttagtagccagcatttaaggtgggcactctagagagactgccagggataacctggaggaaggtggggatgacgtcaaatcatcatgccccttatgaccagggctacacacgtgctacaatggcgtaaacaaagggaagcgagcccgcgagggggagcaaatcccaaaaataacgtctcagttcggattgtagtctgcaactcgactacatgaagctggaatcgctagtaatcgcgaatcagaatgtcgcggtgaatacgttcccgggtcttgtacacaccgcccgtcacaccatgggagtcagtaacgcccgaagtcagtgaccca

SEQ ID NO: 70 - DNA, 1371 bp, Artificial Sequence
  STR00021.1 Collinsella_aerofaciens_strain_JCM_10188_16S_ribosomal_RNA
  misc_feature (925)..(925): n is a, c, g, or t
  misc_feature (1268)..(1268): n is a, c, g, or t
tcgagcgagaagccattgactgaaacttcggtagaaggatatggtggaaagcggcggacgggtgagtaacgcgtaggcaacctgccccttacagagggatagccattggaaacgatgattaaaacctcataacgcatcccccccacatggaggggaagccaaagattcatcggtaagggatgggcctgcgtctgattagcttgttggcggggtaacggcccaccaaggcgacgatcagtagccgacctgagagggtgatcggccacattggaactgagacacggtccaaactcctacgggaggcagcagtggggaatattgcacaatgggcgaaagcctgatgcagcaacgccgcgtgagggatgaaggccttcgggtcgtaaacctctgtccttggggaagaaacaaatgacggtacccatggaggaagccccggctaactacgtgccagcagccgcggtaatacgtagggggcgagcgttatccggaattattgggcgtaaagagtgcgtaggtggttacctaagcgcagggtctaaggcaatggctcaaccattgttcgccctgcgaactgggctacttgagtgcaggagaggaaagcggaattcctagtgtagcggtgaaatgcgtagatattaggaggaacaccagtggcgaaggcggctttctggactgttactgacactgaggcacgaaagcgtggggagcaaacaggattagataccctggtagtccacgccgtaaacgatgagcactaggtgtcggggccgcaaggcttcggtgccgcagttaacgcattaagtgctccgcctggggagtacgcacgcaagtgtgaaactcaaaggaattgacggggacccgcacaagcagcggagcatgtggtttaattcgaagcaacgcgaagaagcttaaccagtgttcgccntccgaactgggctacctaaccggatccttcttcggacagtggagacaggtggtgcatggttgtcgtcagctcgtgtcgtgagatgttgggttaagtcccgcaacgagcgcaacccttgccattagttgccatcattcagttgggcactctaatgggactgccggggacaactcggaggaaggtggggatgacgtcaaatcatcatgccccttatgttctgggctacacacgtgctacaatggccggtacagcaagaagcaaaaccgcgaggtggagcaaatctcaaaaaccggtcccagttcggactgcaggctgaaacccgcctgcacgaagccggagttgntagtaatcgtggatcagaatgccacggtgaatgcgttcccgggtcttgtacacaccgcccgtcacaccatggaagttgggggtgcccgaagccggcagggaaa

SEQ ID NO: 71 - DNA, 1383 bp, Artificial Sequence
  STR00035.1 Collinsella_aerofaciens_strain_JCM_10188_16S_ribosomal_RNA
tcgaggggcagcattttagtttgcttgcaaactgaagatggcgaccggcgcacgggtgagtaacacgtatccaacctgccgataactcggggatagcctttcgaaagaaagattaatatccgatggtatattaagatcgcatgattttactattaaagaatttcggttatcgatggggatgcgttccattagtttgttggcggggtaacggcccaccaagactacgatggataggggttctgagaggaaggtcccccacattggaactgagacacggtccaaactcctacgggaggcagcagtgaggaatattggtcaatggacgagagtctgaaccagccaagtagcgtgaaggatgactgccctatgggttgtaaacttcttttatatgggaataaagtattccacgtgtgggattttgtatgtaccatatgaataaggatcggctaactccgtgccagcagccgcggtaatacggaggatccgagcgttatccggatttattgggtttaaagggagcgtaggtggattgttaagtcagttgtgaaagtttgcggctcaaccgtaaaattgcagttgaaactggcagtcttgagtacagtagaggtgggcggaattcgtggtgtagcggtgaaatgcttagatatcacgaagaactccgattgcgaaggcagctcactagactgcaactgacactgatgctcgaaagtgtgggtatcaaacaggattagataccctggtagtccacacagtaaacgatgaatactcgctgtttgcgatatacagtaagcggccaagcgaaagcattaagtattccacctggggagtacgccggcaacggtgaaactcaaaggaattgacgggggcccgcacaagcggaggaacatgtggtttaattcgatgatacgcgaggaaccttacccgggcttaaattgcaaatgaataatctggaaacaggttagccgcaaggcatttgtgaaggtgctgcatggttgtcgtcagctcgtgccgtgaggtgtcggcttaagtgccataacgagcgcaacccttatctttagttactaacaggtcatgctgaggactctagagagactgccgtcgtaagatgtgaggaaggtggggatgacgtcaaatcagcacggcccttacgtccggggctacacacgtgttacaatggggggtacagaaggcagctacctggcgacaggatgctaatcccaaaaacctctctcagttcggatcgaagtctgcaacccgacttcgtgaagctggattcgctagtaatcgcgcatcagccatggcgcggtgaatacgttcccgggccttgtacacaccgcccgtcaagccatgaaagccgggggtacctgaagtacgtaaccgcaa

SEQ ID NO: 72 - DNA, 1345 bp, Artificial Sequence
  STR00023 Collinsella_aerofaciens_strain_JCM_10188_16S_ribosomal_RNA
tggaagttgaattgactgagtggcggacgggtgagtaacgcgtgggtaacctgccttgtactgggggacaacagttagaaatgactgctaataccgcataagcgcacagtatcgcatgatacagtgtgaaaaactccggtggtacaagatggacccgcgtctgattagctagttggtaaggtaacggcttaccaaggcgacgatcagtagccgacctgagagggtgaccggccacattgggactgagacacggcccaaactcctacgggaggcagcagtggggaatattgcacaatgggcgaaagcctgatgcagcgacgccgcgtgagtgaagaagtatttcggtatgtaaagctctatcagcagggaagaaaatgacggtacctgactaagaagccccggctaactacgtgccagcagccgcggtaatacgtagggggcaagcgttatccggatttactgggtgtaaagggagcgtagacggtaaagcaagtctgaagtgaaagcccgcggctcaactgcgggactgctttggaaactgtttaactggagtgtcggagaggtaagtggaattcctagtgtagcggtgaaatgcgtagatattaggaggaacaccagtggcgaaggcgacttactggacgataactgacgttgaggctcgaaagcgtggggagcaaacaggattagataccctggtagtccacgccgtaaacgatgaatactaggtgttggggagcaaagctcttcggtgccgtcgcaaacgcagtaagtattccacctggggagtacgttcgcaagaatgaaactcaaaggaattgacggggacccgcacaagcggtggagcatgtggtttaattcgaagcaacgcgaagaaccgtggcacggctttggaaactgtctaacggggagtaacgtccccttcccttcggggcggagaagacaggtggtgcatggttgtcgtcagctcgtgtcgtgagatgttgggttaagtcccgcaacgagcgcaacccttattctaagtagccagcggttcggccgggaactcttgggagactgccagggataacctggaggaaggtggggatgacgtcaaatcatcatgccccttatgatctgggctacacacgtgctacaatggcgtaaacaaagagaagcaagaccgcgaggtggagcaaatctcaaaaataacgtctcagttcggactgcaggctgcaactcgcctgcacgaagctggaatcgctagtaatcgcgaatcagaatgtcgcggtgaatacgttcccgggtcttgtacacaccgcccgtcacaccatgggagtcagtaacgcccgaagtcagtgacccaacc

SEQ ID NO: 73 - DNA, 1371 bp, Artificial Sequence
  STR00020.1 Collinsella_aerofaciens_strain_JCM_10188_16S_ribosomal_RNA
agcacttgtgctcgagtggcgaacgggtgagtaatacataagtaacctgccctagacagggggataactattggaaacgatagctaagaccgcataggtacggacactgcatggtgaccgtattaaaagtgcctcaaagcactggtagaggatggacttatggcgcattagctggttggcggggtaacggcccaccaaggcgacgatgcgtagccgacctgagagggtgaccggccacactgggactgagacacggcccagactcctacgggaggcagcagtagggaattttcggcaatgggggaaaccctgaccgagcaacgccgcgtgaaggaagaaggttttcggattgtaaacttctgttataaaggaagaacggcggctacaggaaatggtagccgagtgacggtactttattagaaagccacggctaactacgtgccagcagccgcggtaatagtaggtggcaagcgttatccggaattattgggcgtaaagagggagcaggcggcagcaagggtctgtggtgaaagcctgaagcttaacttcagtaagccatagaaaccaggcagctagagtgcaggagaggatcgtggaattccatgtgtagcggtgaaatgcgtagatatatggaggaacaccagtggcgaaggcgacgatctggcctgcaactgacgctcagtcccgaaagcgtggggagcaaataggattagataccctagtagtccacgccgtaaacgatgagtactaagtgttggatgtcaaagttcagtgctgcagttaacgcaataagtactccgcctgagtagtacgttcgcaagaatgaaactcaaaggaattgacgggggcccgcacaagcggtggagcatgtggtttaattcgaagcaacgcgaagaaacttaccaggtcttgacatactcataaaggctccagagaaggcgagatagctatatgagatacaggtggtgcatggttgtcgtcagctcgtgtcgtgagatgttgggttaagtcccgcaacgagcgcaacccttatcgttagttaccatcattaagttggggtctctagcgagactgccagtgacaagctggaggaaggcggggatgacgtcaaatcatcatgccccttatgacctgggctacacacgtgttacaatggatggtgcagagggaagggaagccgcgaggtgaagcaaaacccataaaaccattctcagttcggattgtagtctgcaactcgactacatgaagttggaatcggtagtaatcgcgaatcagcatgtcgcggtgaatacgttctcgggccttgtacacaccgcccgtcacaccacgagagttgataacacccgaagccggtggcctaaccgcaaggaa

SEQ ID NO: 74 - DNA, 1301 bp, Artificial Sequence
  STR00031.1 Collinsella_aerofaciens_strain_JCM_10188_16S_ribosomal_RNA
ttattccgggatagcctttcgaaagaaagattaatactggatagcataacgagaaggcatcttcttgttattaaagaatttcgataatcgatggggatgcgttccattagtttgttggcggggtaacggcccaccaagacatcgatggataggggttctgagaggaaggtcccccacattggaactgagacacggtccaaactcctacgggaggcagcagtgaggaatattggtcaatggacgagagtctgaaccagccaagtagcgtgaaggatgactgccctatgggttgtaaacttcttttatatgggaataaagtgcagtatgtatactgttttgtatgtaccatacgaataaggatcggctaactccgtgccagcagccgcggtaatacggaggatccgagcgttatccggatttattgggtttaaagggagcgtaggcggattattaagtcagttgtgaaagtttgcggctcaaccgtaaaattgcagttgatactggtagtcttgagtgcagcagaggtaggcggaattcgtggtgtagcggtgaaatgcttagatatcacgaagaactccgattgcgaaggcagcttactggactgtaactgacgctgatgctcgaaagtgtgggtatcaaacaggattagataccctggtagtccacacagtaaacgatgaatactcgctgtttgcgatatacagcaagcggccaagcgaaagcattaagtattccacctggggagtacgccggcaacggtgaaactcaaaggaattgacgggggcccgcacaagcggaggaacatgtggtttaattcgatgatacgcgaggaaccttacccgggcttaaattgcaactgacggatttggaaacagatcttccttcgggcagttgtgaattgcgaaggcggtttactgcagctcgtgccgtgaggtgtcggcttaagtgccataacgagcgcaacccttatctttagttactaacaggtcatgctgaggactctagagagactgccgtcgtaagatgtgaggaaggtggggatgacgtcaaatcagcacggcccttacgtccggggctacacacgtgttacaatggggggtacagaaggcagctacacagcgatgtgatgctaatcccaaaagcctctctcagttcggattggagtctgcaacccgactccatgaagctggattcgctagtaatcgcgcatcagccacggcgcggtgaatacgttcccgggccttgtacacaccgcccgtcaagccatgaaagccgggggtacctgaagtacgtaaccgcaa

SEQ ID NO: 75 - DNA, 1346 bp, Artificial Sequence
  STR00042 Collinsella_aerofaciens_strain_JCM_10188_16S_ribosomal_RNA
tagtggcgaacgggtgagtaacacgtagggaacctgcccatgtgcctgggataacagatggaaacgtctgctaaaaccggataggtatgaggatcgcatgagcctcatattaaaagagcgctagctctgaacatggatggacctgcggcgcattagctagttggcggggtaacggcccaccaaggcaacgatgcgtagccgacctgagagggtgaacggccacattgggactgagacacggcccaaactcctacgggaggcagcagtagggaattttcgtcaatggagggaactctgaacgagcaatgccgcgtgagtgaagaaggtcttcggatcgtaaagctctgttgtaagagaaaaacgatggatataggaaatgatgtccaagtgtggtatcttaccagaaagccacggctaactacgtgccagcagccgcggtaatacgtaggtggcaagcgttatccggaatgattgggcgtaaagggtgcgtaggtggtgcattaagtctgaagtaaaagccagcagctcaactgctgtaagctttggaaactggtgtactagagtgcaggagagggcgatggaattccatgtgtagcggtaaaatgcgtagatatatggaggaacaccagtggcgaaggcggtcgcctggcctgtaactgacactgaggcacgaaagcgtggggagcaaataggattagataccctagtagtccacgccgtaaacgatgagaactaagtgttggagagattcagtgctgcagttaacgcaataagttctccgcctggggagtatgcacgcaagtgtgaaactcaaaggaattgacgggggcccgcacaagcggtggagtatgtggtttaattcgaagcaacgcgaagaaccttaccaggccttgacatggatataaatgttctagagatagaaagatagctatatatcacacaggtggtgcatggttgtcgtcagctcgtgtcgtgagatgttgggttaagtcccgcaacgagcgcaacccttgtcgcatgttaccagcattcagttggggactcatgtgagactgccggtgacaaaccggaggaaggtggggatgacgtcaaatcatcatgccccttatggcctgggctacacacgtactacaatggcgtctacaaagaggagcgacacagtgatgtgaagcaaatctcataaaggacgtctcagttcggattgaagtctgcaactcgacttcatgaagtcggaatcgctagtaatcgcagatcagcatgctgcggtgaatacgttctcgggccttgtacacaccgcccgtcaaaccatgggagttggtaatacccgaagccggtggcataaccgc

SEQ ID NO: 76 - DNA, 1344 bp, Artificial Sequence
  STR00038.1 Collinsella_aerofaciens_strain_JCM_10188_16S_ribosomal_RNA
ggcgaccggcgcacgggtgagtaacacgtatccaacctgccgataactcggggatagcctttcgaaagaaagattaatacccgatagtatagtatttccgcatggtttcactattaaagaatttcggttatcgatggggatgcgttccattagatagttggcggggtaacggcccaccaagtcaacgatggataggggttctgagaggaaggtcccccacattggaactgagacacggtccaaactcctacgggaggcagcagtgaggaatattggtcaatggacgagagtctgaaccagccaagtagcgtgaaggatgactgccctatgggttgtaaacttcttttatacgggaataaagtggagtatgcatactcctttgtatgtaccgtatgaataaggatcggctaactccgtgccagcagccgcggtaatacggaggatccgagcgttatccggatttattgggtttaaagggagcgtaggcgggtgcttaagtcagttgtgaaagtttgcggctcaaccgtaaaattgcagttgatactgggcgccttgagtgcagcataggtaggcggaattcgtggtgtagcggtgaaatgcttagatatcacgaagaactccgattgcgaaggcagcttactggactgtaactgacgctgatgctcgaaagtgtgggtatcaaacaggattagataccctggtagtccacacagtaaacgatgaatactcgctgttggcgatacacagtcagcggccaagcgaaagcattaagtattccacctggggagtacgccggcaacggtgaaactcaaaggaattgacgggggcccgcacaagcggaggaacatgtggtttaattcgatgatacgcgaggaaccttacccgggcttaaattgcagcggaatgtagtggaaacattacagccttcgggccgctgtgaacgtaaaattggagttgatactgggcgccctgagtggtgcataggtaggcggaataccgggtgcagcggttatatgtattgataacacggtcatgctgaggactctatggagactgccgtcgtaagatgtgaggaaggtggggatgacgtcaaatcagcacggcccttacgtccggggctacacacgtgttacaatggggggtacagaaggcagctacctggcgacaggatgctaatccccaaaacctctctcagttcggattggagtctgcaacccgactccatgaagctggattcgctagtaatcgcgcatcagccacggcgcggtgaatacgttcccgggccttgtacacaccgcccgtcaagccatgaaagccgggggtacctgaagtacgtaaccgcaa

SEQ ID NO: 77 - DNA, 1382 bp, Artificial Sequence
  STR00024.1 Collinsella_aerofaciens_strain_JCM_10188_16S_ribosomal_RNA
  misc_feature (1330)..(1330): n is a, c, g, or t
  misc_feature (1334)..(1334): n is a, c, g, or t
  misc_feature (1371)..(1371): n is a, c, g, or t
acggggtgctcatgacggaggattcgtccaacggattgagttacctagtggcggacgggtgagtaacgcgtgaggaacctgccttggagaggggaataacactccgaaaggagtgctaataccgcatgatgcagttgggtcgcatggctctgactgccaaagatttatcgctctgagatggcctcgcgtctgattagctagtaggcggggtaacggcccacctaggcgacgatcagtagccggactgagaggttgaccggccacattgggactgagacacggcccagactcctacgggaggcagcagtggggaatattgggcaatgggcgcaagcctgacccagcaacgccgcgtgaaggaagaaggctttcgggttgtaaacttcttttgtcggggacgaaacaaatgacggtcccgacgaataagccacggctaactacgtgccagcagccgcggtaatacgtaggtggcaagcgttatccggatttactgggtgtaaagggcgtgtaggcgggattgcaagtcagatgtgaaaactgggggctcaacctccagcctgcatttgaaactgtagttcttgagtgctggagaggcaatcggaattccgtgtgtagcggtgaaatgcgtagatatacggaggaacaccagtggcgaaggcggattgctggacagtaactgacgctgaggcgcgaaagcgtggggagcaaacaggattagataccctggtagtccacgccgtaaacgatggatactaggtgtggggggtctgaccccctccgtgccgcagttaacacaataagtatcccacctggggagtacgatcgcaaggttgaaactcaaaggaattgacgggggaccgcacaagcggtggagtatgtggtttaattcgaagcagcgcgaataccattccgaggtttaaactgccggctaaacatccagcctgcatttgagactgtcgtggggaaagtggagacaggtggtgcatggttgtcgtcagctcgtgtcgtgagatgttgggttaagtcccgcaacgagcgcaacccttattgttagttgctacgcaagagcactctagcgagactgccgttgacaaaacggaggaaggtggggacgacgtcaaatcatcatgccccttatgtcctgggccacacacgtactacaatggtggttaacagagggaggcaatcccgcgaggtggagcaaatccctaaaagccatcccagtttggattgcaggctgaaacccgcctgtatgaagttggaatcgctagtaatcgcggatcagcatgccgcggtgaatacgttcccgggccttgtacacaccgcccgncacnccatgagagtcgggaacacccgaagtccgtagcctanccgcaaggagg

SEQ ID NO: 78 - DNA, 1329 bp, Artificial Sequence
  STR00033.1 Collinsella_aerofaciens_strain_JCM_10188_16S_ribosomal_RNA
ttgaggacttgtcttcagcaggagtggcgaacgggtgagtaatacataagcaatctgcccatcggcctgggataacagttggaaacgactgctaataccggataggtgataaagaggcatctctcgatcattaaagttgggatacaacacggatggatgagcttatggcgtattatctagtaggtgaggtaacggctcacctaggcgatgatacgtagccgacctgagagggtgaccggccacattgggactgagacacggcccaaactcctacgggaggcagcagtagggaattttcggcaatgggcgaaagcctgaccgagcaacgccgcgtgagtgaagaaggccttcgggttgtaaagctctgttgtgaaggaagaacggctcatacagggaatggtatgggagtgacggtactttaccagaaccggacttgccaccagcgaggtcggaattattgggcgtaaagggtgcgcaggcggtttgttaagtttaaggtgaaagcgtggggcttaaccccatatagtaaactgacagactaagtacaggagagggcaatggaattccatgtgtacggtaaaatgcgtaatatatggaggaacaccagtggcgaaggcggttgcctggcctgtaactgacgctcatgcacaaagcgtggggagcaaataggattaataccctagtatccacgccgtaaacgatgagaactaatgttggggaaactcatgctgcagttaacgcaataagttctccgcctggggagtatgcacgcaagtgtgaaactcaaaggaattgacgggggcccgcacaagcggtggagtatgtggtttaattcgacgcaacgcgaagaaccttaccaggtcttgacatcccctgcaaagacatagagatatgttggaggttatcagggagacaggtggtgcatggttgtcgtcagctcgtgtcgtgagatgttgggttaagtcccgcaacgagcgcaacccttgtctttagttgctaacattaagttgaggactctagagagactgccggtgacaaaccggaggaaggtggggatgacgtcaaatcatcatgccccttatgacctgggctacacacgtactacaatggcggatacaacgagaagcaagacagtgatgtggagcaaaactcagaaagtccgtctcagttcggattgaagtctgcaacccgacttcatgaagccggaatcgctagtaatcgcggatcagcatgccgcggtgaatacgttctcgggccttgtacacaccgcccgtcaaaccatgagagttggcaatacccgaagccggtggcctaacctcgcaagaggag

SEQ ID NO: 79 - DNA, 1365 bp, Artificial Sequence
  STR00013.1 Collinsella_aerofaciens_strain_JCM_10188_16S_ribosomal_RNA
cgaagtttcgaggaagcttgcttccaaagagacttagtggcgaacgggtgagtaacacgtaggtaacctgcccatgtgtccgggataactgctggaaacggtagctaaaaccggataggtatacagagcgcatgctcagtatattaaagcgcccatcaaggcgtgaacatggatggacctgcggcgcattagctagttggtgaggtaacggcccaccaaggcgatgatgcgtagccggcctgagagggtaaacggccacattgggactgagacacggcccaaactcctacgggaggcagcagtagggaattttcgtcaatgggggaaaccctgaacgagcaatgccgcgtgagtgaagaaggtcttcggatcgtaaagctctgttgtaagtgaagaacggctcatagaggaaatgctatgggagtgacggtagcttaccagaaaccacggctaactacgtgccagcagccgcggtaatacgtaggtggcaagcgttatccggaatcattgggcgtaaagggtgcgtaggtggcgtactaagtctgtagtaaaaggcaatggctcaaccattgtaagctatggaaactggtatgctggagtgcagaagagggcgatggaattccatgtgtagcggtaaaatgcgtagatatatggaggaacaccagtggcgaaggcggtcgcctggtctgtaactgacactgaggcacgaaagcgtggggagcaaataggattagataccctagtagtccacgccgtaaacgatgagaactaagtgttggaggaattcagtgctgcagttaacgcaataagttctccgcctggggagtatgcacgcaagtgtgaaactcaaaggaattgacgggggcccgcacaagcggtggagtatgtggtttaattcgaagcaacgcgaagaaccttaccaggccttgacatgggaacaaataccctagagatagggggataattatggatcacactggtgtgcttgggtgcagaagagggcgatggaattccatttggatcagtaccatgagtagatgcaacccttgtcgcatgttaccagcatcaagttggggactcatgcgagactgccggtgacaaaccggaggaaggtggggatgacgtcaaatcatcatgccccttatggcctgggctacacacgtactacaatggcggccacaaagagcagcgacacagtgatgtgaagcgaatctcataaaggtcgtctcagttcggattgaagtctgcaactcgacttcatgaagtcggaatcgctagtaatcgcagatcagcatgctgcggtgaatacgttctcgggccttgtacacaccgcccgtcaaaccatgggagtcagtaatacccgaa

SEQ ID NO: 80 - DNA, 1253 bp, Artificial Sequence
  STR00022.5 Collinsella_aerofaciens_strain_JCM_10188_16S_ribosomal_RNA
  misc_feature (207)..(207): n is a, c, g, or t
cgtgtataccctgcctcactgtgggggataacagttaaaagtgagtgctaataccgcataagcgcacagtaccgcgtggtacggtgtgaaaaactccggtggtgtgagatggatccgcgtctgattaccctggtgggggggtaacggccccccaaagcgactatcaatacccgacctgagagggtgaccggccactttgggactganacacggcccactctcctacgggaggcagcagtggggaatattgcacagtgggagaaagcctgatgcagccaccccgcgtgagtgaaaatttcgaaggaaaaaatgacggcctgataaaaccccggctaactacgtgccagcaccgcggtaatactagggggcaagcgttatccggatttactgggtgtaaagggagcgtaacggcaacagtctgaagtgaaaacccgggctcaccctggactgctttggaaactgttttgctagagtgtcgagaggtaagtgattcctagtgtagcggtgatgcgtaatattagagaacaccagtggcagcggcttactgtacgataactgacattgacgctcaagagcgtggagagcaaacgagattaaataccctggtaatccacgccgtacaccatgagtgctacgtgttggggggcaaagcccttcggtgccgtcgcaaacgcagtaagcattccacctggggagtacgttcgcaagaatgaaactcaaaggaattgacggggacccgcacaagcggtggagcatgtggtttaattcgaagcaacgcgaagaaccttaccaagtcttgacatcctcttgaccggcgtgtaacggcgccttcccttcggggcaagagagacaggtggtgcatggttgtcgtcagctcgtgtcgtgagatgttgggttaagtcccgcaacgagcgcaacccttatccttagtagccagcaggtagagctgggcactctagggagactgccagggataacctggaggaaggtggggatgacgtcaaatcatcatgccccttatgatttgggctacacacgtgctacaatggcgtaaacaaagggaagcaagacagtgatgtggagcaaatcccaaaaataacgtcccagttcggactgtagtctgcaacccgactacacgaagctggaatcgctagtaatcgcgaatcagaatgtcgcggtgaatacgttcccgggtcttgtacacaccgcccgtcacaccatgggagtcagcaacgcccgaagtcagtgaccca

SEQ ID NO: 81 - DNA, 998 bp, Artificial Sequence
  STR00027 Collinsella_aerofaciens_strain_JCM_10188_16S_ribosomal_RNA
  misc_feature (14)..(14): n is a, c, g, or t
  misc_feature (25)..(27): n is a, c, g, or t
ctatcagcaggganagatgacggtnnngactaagaagccccggctaactacgtgccagcagccgcggtaatacgtagggggcaagcgttatccgggatttactgggtgtaaagggagcgtagacggcgatgcaagccagatgtgaaagcccggggctcaaccccgggactgcatttggaactgcgtggctggagtgtcggagaggcaggcggaattcctagtgtagcggtgaaatgcgtagatattaggaggaacaccagtggcgaaggcggcctgctggacgatgactgacgttgaggctcgaaagcgtggggagcaaacaggattagataccctggtagtccacgccgtaaacgatgactactaggtgtcgggtggcaaggccattcggtgccgcagcaaacgcaataagtagtccacctggggagtacgttcgcaagaatgaaactcaaaggaattgacggggacccgcacaagcggtggagcatgtggtttaattcgaagcaacgcgaagaaccttacctgatcttgacatcccgatgccaaagcgcgtaacgcgctctttcttcggaacatcggtgacaggtggtgcatggttgtcgtcagctcgtgtcgtgagatgttgggttaagtcccgcaacgagcgcaacccctatcttcagtagccagcattccggatgggcactctggagagactgccagggacaacctggaggaaggtggggatgacgtcaaatcatcatgccccttatgaccagggctacacacgtgctacaatggcgtaaacaaagggaggcgaacccgcgagggtgggcaaatcccaaaaataacgtctcagttcggattgtagtctgcaactcgactacatgaagctggaatcgctagtaatcgcgaatcagaatgtcgcggtgaatacgttcccgggtcttgtacacaccgcccgtcacaccatgggagtcagtaacgcccgaagccggtgacccaacccgcaagggagg

SEQ ID NO: 82 - DNA, 1370 bp, Artificial Sequence
  STR00036.1 Collinsella_aerofaciens_strain_JCM_10188_16S_ribosomal_RNA
gggcagcattccagtttgcttgcaactggagatggcgaccggcgcacgggtgagtaacacgtatccaacctgccgataactcggggatagcctttcgaaagaaagattaatacccgatggcataatagaaccgcatggtttgattattaaagaatttcggttatcgatggggatgcgttccattaggcagttggtggggtaacggcccaccaaaccttcgatggataggggttctgaaaggaaggtcccccacattggaactgagacacggtccaaactcctacgggaggcagcagtgaggaatattggtcaatggacgagagtctgaaccagccaagtagcgtgaaggatgactgccctatgggttgtaaacttcttttatatgggaataaagtccacgtgtggatttttgtatgtaccatatgaataaggatcggctaactccgtgccagcagccgcggtaatacggaggatccgagcgttatccggatttattgggtttaaagggagcgtaggtggacagttaagtcagttgtgaaagtttgcggctcaaccgtaaaattgcagttgatactggctgtcttgagtacagtaaggtgggcggaattcgtggtgtacggtgaaatgcttaatatcacaagaactccgattgcgaaggcagctcactggactgcaactgacactgatgctcgaaagtgtgggtatcaaacaggattatataccctggtagtccacacagtaaacgatgaatactcgctgtttgcgatatacagtaagcggccaagcgaaagcattaagtattccacctggggagtacgccggcaacggtgaaactcaaaggaattgacgggggcccgcacaagcggatgaacatgtggtttaattcgatgatacgcgaggaagcttacccgggcttaaattgcatttgaatatattggaaacagtatagtcgtaagacaaatgtgaaggtgctgcatggttgtcgtcagctcgtgccgtgaggtgtcggcttaagtgccataacgagcgcaacccttatcttcagttactaacaggtcatgctgaggactctggagagactgccgtcgtaagatgtgaggaaggtggggatgacgtcaaatcagcacggcccttacgtccggggctacacacgtgttacaatggggggtacagaaggccgctacctggtgacaggatgctaatcccaaaagcctctctcagttcggatcgaagtctgcaacccgacttcgtgaagctggattcgctagtaatcgcgcatcagccatggcgcggtgaatacgttcccgggccttgtacacaccgcccgtcaagccatgaaagccgggggtacctgaagtacgtaaccgcaa

SEQ ID NO: 83 - DNA, 1357 bp, Artificial Sequence
  STR00019 Collinsella_aerofaciens_strain_JCM_10188_16S_ribosomal_RNA
  misc_feature (1324)..(1325): n is a, c, g, or t
  misc_feature (1327)..(1327): n is a, c, g, or t
  misc_feature (1329)..(1329): n is a, c, g, or t
aagagattagcttgctaagatcagaacttgtgtattgactgagtggcggacgggtgagtaacgcgtgggcaacctgccttacacagggggataacagctagaaatggctgctaataccgcataagacctcagtaccgcatggtagaggggtaaaaactccggtggtgtaagatgggcccgcgtctgattaggtagttggtagggtaacggcctaccaagccgacgatcagtagccgacctgagagggtgaccggccacattgggactgagacacggcccaaactcctacgggaggcagcagtggggaatattgcacaatgggggaaaccctgatgcagcgacgccgcgtgaaggatgaagtatttcggtatgtaaacttctatcagcagggaagaagatgacggtacctgactaagaagccccggctaactacgtgccagcagccgcggtaatacgtagggggcaagcgttatccggatttactgggtgtaaagggagcgtagacggcatggcaagtctgaagtgaaagcccggggctcaaccccgggactgctttggaaactgtcaggctagagtgtcggagaggcaagtggaattcctagtgtagcggtgaaatgcgtagatattaggaggaacaccagtggcgaaggcggcttgctggacgatgactgacgttgaggctcgaaagcgtggggagcaaacaggattagataccctggtagtccacgccgtaaacgatgattactaggtgtcgggaagcaaagcttttcggtgccgcagccaacgcaataagtaatccacctggggagtacgttcgcaagaatgaaactcaaaggaattgacggggacccgcacaagcggtggagcatgtgggtttagtaagactgaagcgaagaaccttacctgatcttgacatcccggtgacaaagtatgtaatgtactctttcttcggaacaccggtgacaggtggtgcatggttgtcgtcagctcgtgtcgtgagatgttgggttaagtcccgcaacgagcgcaacccttatctttagtagccagcatttgaggtgggcactctagagagactgccagggataacctggaggaaggtggggatgacgtcaaatcatcatgccccttatgaccagggctacacacgtgctacaatggcgtaaacaaagggaagcgaccctgtgaaggcaagcaaatcccaaaaataacgtctcagttcggattgtagtctgcaactcgactacatgaagctggaatcgctagtaatcgcgaatcagaatgtcgcggtgaatacgttcccgggtcttgtacacaccgcccnncncnccatgggagtcagtaacgcccgaagccg

SEQ ID NO: 84 - DNA, 1377 bp, Artificial Sequence
  STR00034.1 Collinsella_aerofaciens_strain_JCM_10188_16S_ribosomal_RNA
  misc_feature (13)..(13): n is a, c, g, or t
gaagcaattaaanggaagttttcggatggaatttgattgactgagtggcggacgggtgagtaacgcgtggataacctgcctcacactgggggataacagttagaaatgactgctaataccgcataagcgcacagtaccgcatggtacggtgtgaaaaactccggtggtgtgagatggatccgcgtctgattagccagttggcggggtaacggcccaccaaagcgacgatcagtagccgacctgagagggtgaccggccacattgggactgagacacggcccaaactcctacgggaggcagcagtggggaatattgcacaatgggcgaaagcctgatgcagcgacgccgcgtgagtgaagaagtatttcggtatgtaaagctctatcagcagggaagaaaatgacggtacctgactaagaagccccggctaactacgtgccagcagccgcggtaatacgtagggggcaagcgttatccggatttactgggtgtaaagggagcgtagacggcgaagcaagtctgaagtgaaaacccagggctcaaccctgggactgctttggaaactgttttgctagagtgtcggagaggtaagtggaattcctagtgtagcggtgaaatgcgtagatattaggaggaacaccagtggcgaaggcggcttactggacgataactgacgttgaggctcgaaagcgtggggagcaaacaggattagataccctggtagtccacgccgtaaacgatgaatgctaggtgttggggggcaaagcccttcggtgccgtcgcaaacgcagtaagcattccacctggggagtacgttcgcaagaatgaaactcaaaggaattgacggggacccgcacaagcggtggagcatgtggtttaattcgaagcaacgcgaagaaccttaccaagtcttgacatccttttgaccggcgtgtaacggcgccttcccttcggggcaagagagacaggtggtgcatggccgtcgtcagctcgtgtcgtgagatgttgggttaagtcccgcaacgagcgcaacccttatccttagtagccagcaggtagagctgggcactctagggagactgccagggataacctggaggaaggtggggatgacgtcaaatcatcatgccccttatgatttgggctacacacgtgctacaatggcgtaaacaaagggaagcaagacagtgatgtggagcaaatcccaaaaataacgtcccagttcggactgtagtctgcaacccgactacacgaagctggaatcgctagtaatcgcgaatcagaatgtcgcggtgaatacgttcccgggtcttgtacacaccgcccgtcacaccatgggagtcagcaacgcccgaagtcagtgacccaactcgcaag

SEQ ID NO: 85 - DNA, 1361 bp, Artificial Sequence
  STR00012.5 Collinsella_aerofaciens_strain_JCM_10188_16S_ribosomal_RNA
agcttgcttccaaagagacttagtggcgaacgggtgagtaacacgtaggtaacctgcccatgtgtccgggataactgctggaaacggtagctaaaaccggataggtatacagagcgcatgctcagtatattaaagcgcccttcaaggcgtgaacatggatggacctgcggcgcattagctagttggtgaggtaacggcccaccaaggcaatgatgcgtagccggcctgagagggtaaacggccacattgggactgagacacggcccaaactcctacgggaggcagcagtagggaattttcgtcaatgggggaaaccctgaacgagcaatgccgcgtgagtgaagaaggtcttcggatcgtaaagctctgttgtaagtgaagaacggctcatagaggaaatgctatgggagtgacggtagcttaccagaaagccacggctaactacgtgccagcagccgcggtaatacgtaggtggcaagcgttatccggaatcattgggcgtaaagggtgcgtaggtggcgtactaagtctgtagtaaaaggcaatggctcaaccattgtaagctatggaaactggtatgctggagtgcagaagagggcgatggaattccatgtgtagcggtaaaatgcgtagatatatggaggaacaccagtggcgaaggcggtcgcctggtctgtaactgacactgaggcacgaaagcgtggggagcaaataggattagataccctagtagtccacgccgtaaacgatgagaactaagtgttggaggaattcagtgctgcagttaacgcaataagttctccgcctggggagtatgcacgcaagtgtgaaactcaaaggaattgacgggggcccgcacaagcggtggagtatgtggtttaattcgaagcaacgcgaagaatcttaccaggccttgacatggaaacaaataccctagagatagggggataattatggatcacacaggtggtgcatggttgtcgtcagctcgtgtcgtgagatgttgggttaagtcccgcaacgagcgcaacccttgtcgcatgttaccagcatcaagttggggactcatgcgagactgccggtgacaaaccggaggaaggtggggatgacgtcaaatcatcatgccccttatggcctgggctacacacgtactacaatggcgaccacaaagagcagcgacacagtgatgtgaagcgaatctcataaaggtcgtctcagttcggattgaagtctgcaactcgacttcatgaagtcggaatcgctagtaatcgcagatcagcatgctgcggtgaatacgttctcgggccttgtacacaccgcccgtcaaaccatgggagtcagtaatacccgaagccggtggc

SEQ ID NO: 86 - DNA, 1350 bp, Artificial Sequence
  STR00045.1 Collinsella_aerofaciens_strain_JCM_10188_16S_ribosomal_RNA
agagttttcggacaatggaattggctgtttagtggcggacgggtgagtaacgcgtgagtaacctgccttggagtggggaataacacagtgaaaactgtgctaataccgcatgatatattggtgtcgcatggcgctgatatcaaagatttatcgctctgagatggactcgcgtctgattagatagttggcggggtaacggcccaccaagtcgacgatcagtagccggactgagaggttggccggccacattgggactgagacacggcccagactcctacgggaggcagcagtggggaatattgggcaatgggcgcaagcctgacccagcaacgccgcgtgaaggaagaaggctttcgggttgtaaacttcttttaacagggacgaagcaagtgacggtacctgttgaataagccacggctaactacgtgccagcagccgcggtaatactagggcaagcgttatccggatttactgggtgtaaagggcgtgtagcgggactgcaagtcagatgtgaaaactatgggctcaacccatagcctgcatttgaaactgtagttcttgagtgtcggagaggcaatcggaattccgtgtgtagcggtgaaatgcgtagatatacggaggaacaccagtggcgaaggcggattgctggacgataactgacgctgagcgcgaaagcgtggggagcaaacaggattagataccctggtagtccacgccgtaaacgatggatactagtgtggggggtctgaccccctccgtgccgcagctaacgcaataagtatcccacctggggagtacgatcgcaaggtgaaactcaaaggaattgacgggggcccgcacagcggtggaatatgtggtttaattcaaagcaacgcgaagaaccttaccaaggcttgacatcctactaacgaaccagagatggattagtcacctttggggaaaagtagagacaggtggtgcatggttgtcgtcagctcgtgtcgtgagatgttgggttaagtcccgcaacgagcgcaacccttattgttagttgctacgcaagagcactctagcgagactgccgttgacaaaacggaggaaggtggggacgacgtcaaatcatcatgccccttatgtcctgggccacacacgtactacaatggcggttaacagagggaggcaaagccgcgaggcagagcaaacccctaaaagccgtcccagttcggattgcaggctgaaacccgcctgtatgaagtcggaatcgctagtaatcgcggatcagcatgccgcggtgaatacgttcccgggccttgtacacaccgcccgtcacaccatgagagtcgggaacacccgaagtccgtagcctaactg

SEQ ID NO: 87 - DNA, 1368 bp, Artificial Sequence
  STR00047.1 Collinsella_aerofaciens_strain_JCM_10188_16S_ribosomal_RNA
  misc_feature (922)..(922): n is a, c, g, or t
  misc_feature (924)..(926): n is a, c, g, or t
  misc_feature (1006)..(1006): n is a, c, g, or t
tcgaacggacggattggagcttgctccatgaagttagtggcggacgggtgagtaacgcgtgggtaacctgccctatgcagggggataacgtttggaaacgaacgctaataccgcataacctagttggttcgcatgaaccgactagcaaagattttatcggcataggatggacccgcgttggattagctagttggtgagataacagcccaccaaggcaacgatccatagccggcctgagagggtgaacggccacactgggactgagacacggcccagactcctacgggaggcagcagtggggaatattgcacaatgggcgcaagcctgatgcagcgacgccgcgtgaaggatgaaggtcttcggatcgtaaacttctatcagcagggaagaaaccatgacggtacctgactaagaagccccggctaactacgtgccagcagccgcggtaatacgtagggggcaagcgttatccggaattactgggtgtaaagggtgcgtaggcggcgatttaagtcagatgtgaaaactcagggctcaaccttgagactgcattgaaactgagttgctagagtgcaggagaggaaagcggaattccgagtgtagcggtgaaatgcgtagagattcggaggaacaccagtagcgaaggcggctttctggactgtaactgacgctgaggcacgaaagcgtggggagcgaacaggattagataccctggtagtccacgccgtaaacgatgaatactaggtgtcggggcttacgggtctcggtgccgcagctaacgcattaagtattccacctgggaagtacgaccgcaaggttgaaactcaaaggaattgacggggacccgcacaagcggtggagcatgtggtttaattcgaagcaacgcgaagaaccttacctaaacttgacatccctttcgtcngnnngaaatactgggtgtaaagggtgcgtagggggcaattgaaatcaggtgtgaagactcagggctcaaccttgagactgcatntggatcagagccgctagaggcgcaacccctatctttagtagccatcattcagttgggcactctagagagactgccagggataacctggaggaaggtggggatgacgtcaaatcatcatgccccttatgtttagggctacacacgtgctacaatgggtgctacaaagggaagcaaatccgcgaggccgagcaaatctcaaaaaagcactcccagttcggattgtagtctgcaactcgactacatgaagttggaatcgctagtaatcgcgaatcagaatgtcgcggtgaatacgttcccgggtcttgtacacaccgcccgtcacaccatgggagttgggggggcccaacgccagtgacctaacc

SEQ ID NO: 88 - DNA, 1352 bp, Artificial Sequence
  STR00002.1 Collinsella_aerofaciens_strain_JCM_10188_16S_ribosomal_RNA
  misc_feature (15)..(15): n is a, c, g, or t
cttcggatgaagagntttgtgactgagtggcggacgggtgagtaacgcgtgggtaacctgcctcatacagggggataacagttagaaatgactgctaataccgcataagaccacagagccgcatggctcagagggaaaaactccggtggtatgagatggacccgcgtctgattaggtagttggtggggtaacggcctaccaagccgacgatcagtagccgacctgagagggtgaccggccacattgggactgagacacggcccaaactcctacgggaggcagcagtggggaatattgcacaatgggggaaaccctgatgcagcgacgccgcgtgagcgaagaagtatttcggtatgtaaagctctatcagcagggaagaaaagacggtacctgctaagaagcaccggctaaatacgtgccagcagccgcggtaatacgtatggtgcaagcgttatccggatttactgggtgtaaagggagcgtagacggctgtgtaagtctgaagtgaaagcccggggctcaaccccgggactgctttggaaactatgcagctagagtgtcggagaggtaagtggaattcccagtgtagcggtgaaatgcgtagatattgggaggaacaccagtggcgaaggcggcttactggacgatgactgacgttgaggctcgaaagcgtggggagcaaacaggattagataccctggtagtccacgccgtaaacgatgactactaggtgtcggggagcaaagctcttcggtgccgcagcaaacgcaataagtagtccacctggggagtacgttcgcaagaatgaaactcaaaggaattgacggggacccgcacaagcggtggagcatgtggtttaattcgaagcaacgcgaagaaccttacctgctcttgacatcccggtgaccggcatgtaatgatgccttttcttcggaacaccgggggagggacaccagtggctaaggcggcctcgtgtcgtgagatgttgggttaagtcccgcaacgagcgcaacccttatcttcagtagccagcaattcggatgggcactctggagagactgccagggataacctggaggaaggtggggatgacgtcaaatcatcatgccccttatgagcagggctacacacgtgctacaatggcgtaaacaaaggggagcaagcctgcgagggtaagcaaatctcaaaaataacgtctcagttcggattgtagtctgcaactcgactacatgaagctggaatcgctagtaatcgcgaatcagcatgtcgcggtgaatacgttcccgggtcttgtacacaccgcccgtcacaccatgggagttggtaacgcccgaagtcagtgacccaaccgt

SEQ ID NO: 89 - DNA, 1361 bp, Artificial Sequence
  STR00052.1 Collinsella_aerofaciens_strain_JCM_10188_16S_ribosomal_RNA
  misc_feature (927)..(927): n is a, c, g, or t
aacggacggattggagcttgctccatgaagttagtggcggacgggtgagtaacgcgtgggtaacctgccctatgcagggggataacgtttggaaacgaacgctaataccgcataacctagttggttcgcatgaaccgactagcaaagattttatcggcataggatggacccgcgttggattagctagttggtgagataacagcccaccaaggcaacgatccatagccggcctgagagggtgaacggccacactgggactgagacacggcccagactcctacgggaggcagcagtggggaatattgcacaatgggcgcaagcctgatgcagcgacgccgcgtgaaggatgaaggtcttcggatcgtaaacttctatcagcagggaagaaaccatgacggtacctgactaagaagccccggctaactacgtgccagcagccgcggtaatacgtagggggcaagcgttatccggaattactgggtgtaaagggtgcgtaggcggcgatttaagtcagatgtgaaaactcagggctcaaccttgagactgcatctgaaactgagttgctagagtgcaggagaggaaagcggaattccgagtgtagcggtgaaatgcgtagagattcggaggaacaccagtagcgaaggcggctttctggactgtaactgacgctgagcacgaaagcgtggggagcgaacaggattagataccctggtagtccacgccgtaaacgatgaatactagtgtcggggcttacgggtctcggtgccgcagctaacgcattaagtattccacctgggaagtacgaccgcaggttgaaactcaaaggaattgaggggacccgcacaagcggtggagcatgtggtttaattcgaagcaacgcgaagaacttacctaaacttgacatccatttgtccggacggtaatgcnttcttcactagcttgctagtgcaaaagtgacaggtggtgcatggttgtcgtcagctcgtgtcgtgagatgttgggttaagtcccgcaacgagcgcaacccctatctttagtagccatcattcagttgggcactctagagagactgccagggataacctggaggaaggtggggatgacgtcaaatcatcatgccccttatgtttagggctacacacgtgctacaatgggtgctacaaagggaagcaaatccgcgaggccgagcaaatctcaaaaaagcactcccagttcggattgtagtctgcaactcgactacatgaagttggaatcgctagtaatcgcgaatcagaatgtcgcggtgaatacgttcccgggtcttgtacacaccgcccgtcacaccatgggagttgggggggcccaacgccagtgacctaacc

SEQ ID NO: 90 - DNA, 1360 bp, Artificial Sequence
  STR00056.1 Collinsella_aerofaciens_strain_JCM_10188_16S_ribosomal_RNA
  misc_feature (926)..(926): n is a, c, g, or t
cggattggagcttgctccatgaagttagtggcggacgggtgagtaacgcgtgggtaacctgccctatgcagggggataacgtttggaaacgaacgctaataccgcataacctagttggttcgcatgaaccgactagcaaagattttatcggcataggatggacccgcgttggattagctagttggtgagataacagcccaccaaggcaacgatccatagccggcctgagagggtgaacggccacactgggactgagacacggcccagactcctacgggaggcagcagtggggaatattgcacaatgggcgcaagcctgatgcagcgacgccgcgtgaaggatgaaggtcttcggatcgtaaacttctatcagcagggaagaaaccatgacggtacctgactaagaagccccggctaactacgtgccagcagccgcggtaatacgtagggggcaagcgttatccggaattactgggtgtaaagggtgcgtaggcggcgatttaagtcagatgtgaaaactcagggctcaaccttgagactgcatctgaaactgagttgctagagtgcaggagaggaaagcggaattccgagtgtagcggtgaaatgcgtagagattcggaggaacaccagtagcgaaggcggctttctggactgtaactgacgctgaggcacgaaagcgtggggagcgaacaggattagataccctggtagtccacgccgtaaacgatgaatactaggtgtcggggcttacgggtctcggtgccgcagctaacgcattaagtattccacctgggaagtacgaccgcaaggttgaaactcaaaggaattgacggggacccgcacaagcggtggagcatgtggtttaattcgaagcaacgcgaagaaccttacctaaacttgacatccacttaggccgcaacctagagnctgcttctgaaactgagttgctaaaagtgacgggaggaaagcggaattccgcagctcgtgtcgtgagatgttgggttaagtcccgcaacgagcgcaacccctatctttagtagccatcattcagttgggcactctagagagactgccagggataacctggaggaaggtggggatgacgtcaaatcatcatgccccttatgtttagggctacacacgtgctacaatgggtgctacaaagggaagcaaatccgcgaggccgagcaaatctcaaaaaagcactcccagttcggattgtagtctgcaactcgactacatgaagttggaatcgctagtaatcgcgaatcagaatgtcgcggtgaatacgttcccgggtcttgtacacaccgcccgtcacaccatgggagttgggggggcccaacgccagtgacctaacc

SEQ ID NO: 91 - DNA, 1368 bp, Artificial Sequence
  STR00048.1 Collinsella_aerofaciens_strain_JCM_10188_16S_ribosomal_RNA
cactttaccggatttcttcggaatgaaagttttgtgactgagtggcggacgggtgagtaacgcgtgggtaacctgcctcatacagggggataacagttagaaatgactgctaataccgcataagaccacaggatcgcatggtccggtggtaaaaactccggtggtatgagatggacccgcgtctgattaggtagttggtggggtaacggcttaccaaggcgacgatcagtagccgacctgagagggtgaccggccacattgggactgagacacggcccaaactcctacgggaggcagcagtggggaatattgcacaatgggggaaaccctgatgcagcgacgccgcgtgagcgatgaagtatttcggtatgtaaagctctatcagcagggaagaaaatgacggtacctgactaagaagcaccggctaaatacgtgccagcagccgcggtaatacgtatggtgcaagcgttatccggatttactgggtgtaaagggagcgtagacggagaggcaagtctgatgtgaaaacccggggctcaaccccgggactgcattggaaacttttttctagagtgtcggagaggtaagtggaattcctagtgtagcggtgaaatgcgtagatattaggaggaacaccagtggcgaaggcggcttactggacgatgactgacgttgaggctcgaaagcgtggggagcaaacaggattagataccctggtagtccacgccgtaaacgatgactgctaggtgtcgggaggcaaagcctttcggtgccgcagcaaacgcaataagcagtccacctggggagtacgttcgcaagaatgaaactcaaaggaattgacggggacccgcacaagcggtggagcatgtggtttaattcgaagcaacgcgaagaaccttacctgcccttgacatccggctgacccgcgagtaatgtcgcctttccttcgggacagccgagacaggtggcgcatggttgtcgtcagctcgtgtcgtgagatgtttgggtgaggtccgtgaagagcgcaacccttatctttagtagccagcatttcggatgggcactctagagagactgccagggataacctggaggaaggtggggatgacgtcaaatcatcatgccccttatgggcagggctacacacgtgctacaatggcgtaaacaaagggaggcaagcctgcgagggtgagcaaatcccaaaaataacgtctcagttcggattgtagtctgcaactcgactacatgaagctggaatcgctagtaatcgcgaatcagaatgtcgcggtgaatacgttcccgggtcttgtacacaccgcccgtcacaccatgggagttggtaacgcccgaagtcagtgacccaaccgt

SEQ ID NO: 92 - DNA, 1357 bp, Artificial Sequence
  STR00046.1 Collinsella_aerofaciens_strain_JCM_10188_16S_ribosomal_RNA
  misc_feature (14)..(14): n is a, c, g, or t
  misc_feature (1311)..(1312): n is a, c, g, or t
tccaaagagacttngtggggaacgggtgagtaacacgtaggtaacctgcccatgtgcccgggataactgctggaaacggtagctaaaaccggataggtatgagggaggcatcttcctcatattaaagcaccttcgggtgtgaacatggatggacctgcggcgcattagctggttggtgaggtaacggcccaccaaggcgatgatgcgtagccgacctgagagggtgaacggccacattgggactgagacacggcccaaactcctacgggaggcagcagtagggaattttcgtcaatggggggaaccctgaacgagcaatgccgcgtgtgtgaagaaggtcttcggatcgtaaagcactgttgtaagtgaagaatgccatatagaggaaatgctatgtgggtgacggagcttaccagaaagccacggtaactacgtgccagcagccgcggtaatacgtaggtggcaagcgttatccggaatcattgggcgtaaagggtgcgtaggtggcacgataagtctgaagtaaaaggcaacagctcaactgttgtatgctttggaaactgtcgagctagagtgcagaagagggcgatggaattccatgtgtagcggtaaaatgcgtagatatatggaggaacaccagtggcgaaggcggtcgcctggtctgtaactgacactgatgcacgaaagcgtggggagcaaataggattagataccctagtagtccacgccgtaaacgatgagaactaagtgttggagagattcagtgctgcagttaacgcaataagttctccgcctggggagtatgcacgcaagtgtgaaactcaaaggaattgacgggggcccgcacaagcggtggagtatgtggtttaattcgaagcaacgcgaagaaccttaccaggccttgacatgtatataaatgatctagaaatagaaagatagctatatatcacacaggtggtgcatggttgtcgtcagctcgtgtcgtgagatgttgggttaagtcccgcaacgagcgcaacccttgtcttctgttaccagcattaagttggggactcaggagagactgccggtgacaaaccggaggaaggtggggatgacgtcaaatcatcatgccccttatggcctgggctacacacgtactacaatggcgcctacaaagagcagcgacaccgcgaggtggagcgaatctcataaagggcgtctcagttcggattgaagtctgcaactcgacttcatgaagtcggaatcgctagtaatcgcagatcagcatgctgcggtgaatacgttctcgggccttgtacacaccgcccnncaaaccatgggagttggtaatacccgaagccggtggcataaccgc

SEQ ID NO: 93 - DNA, 1346 bp, Artificial Sequence
  STR00049 Collinsella_aerofaciens_strain_JCM_10188_16S_ribosomal_RNA
  misc_feature (123)..(123): n is a, c, g, or t
  misc_feature (1329)..(1329): n is a, c, g, or t
accgccctcgggcggacatgaagtggcgaacgggtgagtaacacgtgaccaacctgcccccctctccgggacaaccttgggaaaccgaggctaataccggatactccctcccctgctcctggnggggtcgggaaagcccaggcggagggggatggggtcgcggcccattaggtagtaggcggggtaacggcccacctagcccgcgatgggtagccgggttgagagaccgaccggccacattgggactgagatacggcccagactcctacgggaggcagcagtggggaattttgcgcaatgggggaaaccctgacgcagcaacgccgcgtgcgggacgacggccttcgggttgtaaaccgctttcagcagggaagaaattcaggcctgcagaagaagctccggctaactacgtgccagcagccgcggtaatacgtagggagcgagcgttatccggattcattgggcgtaaagagcgcgtaggcggcctctcaagcgggatctctaatccgagggctcaacccccggccggatcccgaactgggaggctcgagttcggtagaggcaggcggaattcccggtgtagcggtggaatgcgcagatatcgggaagaacaccgatggcgaaggcagcctgctgggccgcaactgacgctgaggcgcgaaagctaggggagcgaacaggattagataccctggtagtcctagccgtaaacgatggatactaggtgtggggggctccgccctccgtgccgcagccaacgcattaagtatcccgcctggggagtacggccgcaaggctaaaactcaaaggaattgacgggggcccgcacaagcagcggagcatgtggcttagttcgaagcaacgcgaagaacctcaccaggcctgatcccgaactggaagccggggaaacccggtggccgagaggaacgtccgcaggtggtgcatggctgtcgtcagctcgtgtcgtgacatgttgggttaagtcccgcaacgagcgcaacccctgccccatgttgccagcattaggttggggactcatgggggactgccggcgtcaagccggaggaaggtggggacgacgtcaagtcatcatgccctttatgccctgggctgcacacgtgctacaatggccggtacaacgggctgcgagaccgcgaggtcgagcgaatccctcaaagccggccccagttcggatcggaggctgcaacccgcctccgtgaagtcggagttgctagtaatcgcggatcagcatgccgcggtgaatacgttcccgggccttgtacacaccgcccgtcacaccacccgagtcgtctgcacccgaagccgccntccgaacccgcaagggg

SEQ ID NO: 94 - DNA, 1338 bp, Artificial Sequence
  STR00051.1 Collinsella_aerofaciens_strain_JCM_10188_16S_ribosomal_RNA
cgaacgcgagcagcaatgctcgagtggcgaacgggtgagtaatacataagtaacctgccctagacagggggataactgctggaaacggcagctaagaccgcataggtatggacactgcatggtgaccatattaaaagtgccaaggcactggtagaggatggacttatggcgcattagctggttggtgaggtaacggctcaccaaggcgacgatgcgtagccgacctgagagggtgaccggccacactgggactgagacacggcccagactcctacgggaggcagcagtagggaattttcggcaatggggggaaccctgaccgagcaacgccgcgtgaaggaagaaggaattcgttctgtaaacttctgttataaaggaagaacggcggatatagggaatgatatccgagtgacggtactttatgagaaagccacggctaactacgtgccagcagccgcggtaatacgtaggtggcgagcgttatccggaattattgggcgtaaagagggagcaggcggcggcagaggctgtggaagaaagcttaactaaccaaccgggctgctagagtgcaggagaggatcgtggaaccatgtgtagcggtgaaatgcgtagatatatggaggaacaccagtggcgaaggcgacggtctggcctgtaactgacgctcattcccgaaagcgtggggagcaaataggattagataccctagtagtcacgccgtaaacgatgagtactaagtgttgggagtcaaatttcagtgctgcagttaacgcaataagtactccgcctgagtagtacgttcgcaagaatgaaactcaaaggaattgacgggggcccgcacaagcggtggagcatgtggtttaattcgaagcaacgcgaagaaccttaccaggtcttgacatccggataaagacctcagagatgaggggatagatatatccgaacggggactcgtgtcgtgagatgttgggttaagtcccgcaacgagcgcaacccttgtcgctagttaccatcattaagttggggactctagcgagactgccagtgacaagctggaggaaggcggggatgacgtcaaatcatcatgccccttatgacctgggctacacacgtgctacaatggatggagcagagggaagcgaagccgcgaggtgaagcaaaacccataaaaccattctcagttcggattgtagtctgcaactcgactacatgaagttggaatcgctagtaatcgcgaatcagcatgtcgcggtgaatacgttctcgggccttgtacacaccgcccgtcacaccatgagagttgataacacccgaagccggtggcctaaccgcaaggag

SEQ ID NO: 95 - DNA, 1387 bp, Artificial Sequence
  STR00001.1 Collinsella_aerofaciens_strain_JCM_10188_16S_ribosomal_RNA
  misc_feature (935)..(936): n is a, c, g, or t
  misc_feature (1381)..(1381): n is a, c, g, or t
tctctaggaagcttgcttccaaagagacttagtggcgaacgggtgagtaacacgtaggtaacctgcccatgtgtctgggataactgctggaaacggtagctaaaaccggataggtatacggagcgcatgctctgtatattaaagcacccttcaaggtgtgaacatggatggacctgcggcgcattagctagttggtgaggtaacggcccaccaaggcgatgatgcgtagccggcctgagagggtaaacggccacattgggactgagacacggcccaaactcctacgggaggcagcagtagggaattttcgtcaatggggggaaccctgaacgagcaatgccgcgtgagtgaagaaggtcttcggatcgtaaagctctgttgtaagtgaagaacggctcataggaaatgctatgggagtgaggtagcttaccagaaagccacggctaactacgtgccagcagccgcggtaatacgtaggtggcaagcgttatccggaatcattgggcgtaaagggtgcgtaggtggcgtactaagtctgtagtaaaaggcaatggtcaaccattgtaagctatggaaactggtaggctagagtgcagaagagggcgatggaattccatgtgtagcggtaaaatgcgtagatatatggaggaacaccagtggcgaaggcggtcgcctggtctgtaactgacactgaggcacgaaagcgtggggagcaaataggattagataccctagtagtccacgccgtaaacgatgagaactaagtgttggaggaattcagtgctgcagttaacgcaataagttctccgcctggggagtatgcacgcaagtgtgaaactcaaaggaattgacgggggcccgcacaagcggtggagtatgtggtttaattcgaagcaacgcgaagaaccttaccaggccttgacatggaaacaaannccctagagatagggagataaatatggatcacacaggtggtgcatggttgtcgtcagctcgtgtcgtgagatgttgggttaagtcccgcaacgagcgcaacccttgtcgcatgttaccagcatcaagttggggactcatgcgagactgccggtgacaaaccggaggaaggtggggatgacgtcaaatcatcatgccccttatggcctgggctacacacgtactacaatggcgaccacaaagagcagcgacttggtgacaagaagcgaatctcataaaggccgtctcagttcggattgaagtctgcaactcgacttcatgaagtcggaatcgctagtaatcgcagatcagcatgctgcggtgaatacgttctcgggccttgtacacaccgcccgtcaaaccatgggagtcagtaatacccgaagccggtggcataaccgtaaggagngagccg

SEQ ID NO: 96 - DNA, 1360 bp, Artificial Sequence
  STR00054.1 Collinsella_aerofaciens_strain_JCM_10188_16S_ribosomal_RNA
gcgagaggagttccttcgggaacaaatctagcggcggacgggtgagtaacacgtgggcaacctgccttgtagaggggaatagccttccgaaaggaagattaataccgcataatattacattttcgcatgaagaagtaattaaaggagcaatccgctacaagatgggcccgcggcgcattagctagttggtgaggtaacggctcaccaaggcgacgatgcgtagccgacctgagagggtgatcggccacattgggactgagacacggcccagactcctacgggaggcagcagtggggaatattgcacaatgggggaaaccctgatgcagcaacgccgcgtgagtgatgaaggtcttcggatcgtaaagctctgtcttcagggacgataatgacggtacctgaggaggaagccacggctaactacgtgccagcagccgcggtaatacgtaggtggcgagcgttgtccggatttactgggcgtaaagggagcgtaggcggatttttaagtgagatgtgaaatacccgggctcaacttgggtgctgcatttcaaactggaagtctagagtgcaggagaggagagtggaattcctagtgtagcggtgaaatgcgtagagattaggaagaacaccagtggcgaaggcgactctctggactgtaactgacgctgaggctcgaaagcgtggggagcaaacaggattagataccctggtagtccacgccgtaaacgatgaatactaggtgtaggggttgtcatgacctctgtgccgccgcaaacgcattaagtattccgcctggggagtacggtcgcaagattaaaactcaaaggaattgaggggccagcgagcagccgggttaattcgtaggtagcgagagtagcctggctttacttggcgtaaacggagcttaggctgatttttgaatgtcctttcggggacaggatgacaggtggtgcatggttgtcgtcagctcgtgtcgtgagatgttgggttaagtcccgcaacgagcgcaacccttattgttagttgctaccatttagttgagcactctagcgagactgcccgggttaaccgggaggaaggtggggatgacgtcaaatcatcatgccccttatgtctagggctacacacgtgctacaatggcaagtacaaagagatgcgataccgcgaggtggagctaaactataaaacttgtctcagttcggattgtaggctgaaactcgcctacatgaagctggagttgctagtaatcgcgaatcagaatgtcgcggtgaatacgttcccgggccttgtacacaccgcccgtcacaccatgagagttggcaatacccaaagttcgtgagctaacccgtaagggaggcagc

SEQ ID NO: 97 - DNA, 1370 bp, Artificial Sequence
  STR00134.1 Collinsella_aerofaciens_strain_JCM_10188_16S_ribosomal_RNA
cgatggagaacggagatttcggttgaagttttctattgactgagtggcggacgggtgagtaacgcgtgggtaacctgccctatacagggggataacagttagaaatgactgctaataccgcataagcgcacagcttcgcatgaagcggtgtgaaaaactgaggtggtataggatggacccgcgttggattagctagttggtgaggtaacggcccaccaaggcgacgatccatagccggcctgagagggtgaacggccacattgggactgagacacggcccaaactcctacgggaggcagcagtggggaatattgcacaatgggggaaaccctgatgcagcgacgccgcgtgaaggaagaagtatctcggtatgtaaacttctatcagcagggaagaaagtgacggtacctgactaagaagccccggctaattacgtgccagcagccgcggtaatacgtaaggggcaagcgttatccggatttactgggtgtaaagggagcgtagacggtttggcaagtctgatgtgaaaggcatgggctcaacctgtggactgcattggaaactgtcaggcttgagtgccggagaggcaagcggaattcctagtgtagcggtgaaatgcgtagatattaggaggaacaccagtggcgaaggcggcctgctggacggtaactgacgttgaggctcgaaagcgtggggagcaaacaggattagataccctggtagtccacgctgtaaacgatgaatactaggtgtcgggtggcaaagccattcggtgccgcagcaaacgcaataagtattccacctggggagtacgttcgcaagaatgaaactcaaaggaattgacggggacccgcacaagcggtggagcatgtggtttaattcgaagcaacgcgaagaaccttaccaaatcttgacatccctctgaccgggaagtaatgttcccttttcttcggaacagaggagacaggtggtgcatggttgtcgtcagctcgtgtcgtgagatgttgggttaagtcccgcaacgagcgcaacccttattcttagtagccagcaggtaaagctgggcactctagggagactgccagggataacctggaggaaggtggggatgacgtcaaatcatcatgccccttatgatttgggctacacacgtgctacaatggcgtaaacaaagggaagcgaaggggtgacctggagcaaatctcaaaaataacgtctcagttcggattgtagtctgcaactcgactacatgaagctggaatcgctagtaatcgcgaatcagaatgtcgcggtgaatacgttcccgggtcttgtacacaccgcccgtcacaccatgggagtcagtaacgcccgaagtcagtgacccaacc

SEQ ID NO: 98 - DNA, 958 bp, Artificial Sequence
  STR00133 Collinsella_aerofaciens_strain_JCM_10188_16S_ribosomal_RNA
agaagccccggctaactacgtgccagcagccgcggtaatacgtagggggcaagcgttatcccggatttactgggtgtaaagggagcgtagacggcgatgcaagccagatgtgaaagcccggggctcaaccccgggactgcatttggaactgcgtggctggagtgtcggagaggcaggcggaattcctagtgtagcggtgaaatgcgtagatattaggaggaacaccagtggcgaaggcggcctgctggacgatgactgacgttgaggctcgaaagcgtggggagcaaacaggattagataccctggtagtccacgccgtaaacgatgactactaggtgtcgggtggcaaggccattcggtgccgcagcaaacgcaataagtagtccacctggggagtacgttcgcaagaatgaaactcaaaggaattgacggggacccgcacaagcggtggagcatgtggtttaattcgaagcaacgcgaagaaccttacctgatcttgacatcccgatgccaaagcgcgtaacgcgctctttcttcggaacatcggtgacaggtggtgcatggttgtcgtcagctcgtgtcgtgagatgttgggttaagtcccgcaacgagcgcaacccctatcttcagtagccagcattccggatgggcactctggagagactgccagggacaacctggaggaaggtggggatgacgtcaaatcatcatgccccttatgaccagggctacacacgtgctacaatggcgtaaacaaagggaggcgaacccgcgagggtgggcaaatcccaaaaataacgtctcagttcggattgtagtctgcaactcgactacatgaagctggaatcgctagtaatcgcgaatcagaatgtcgcggtgaatacgttcccgggtcttgtacacaccgcccgtcacaccatgggagtcagtaacgcccgaagccggtgacccaacccgc

SEQ ID NO: 99 - DNA, 1363 bp, Artificial Sequence
  STR00132.5 Collinsella_aerofaciens_strain_JCM_10188_16S_ribosomal_RNA
  misc_feature (149)..(149): n is a, c, g, or t
agttttcggatggaatccgtataacttagtggcggacgggtgagtaacgcgtgggaaacctgccctgtaccgggggataacacttagaaataggtgctaataccgcataagcgcacggaaccgcatggttctgtgtgaaaaactccggnggtacaggatggtcccgcgtctgattagccagttggcagggtaacggcctaccaaagcgacgatcagtagccggcctgagagggtgaacggccacattgggactgagacacggcccaaactcctacgggaggcagcagtggggaatattgcacaatgggggaaaccctgatgcagcgacgccgcgtgagtgaagaagtatttcggtatgtaaagctctatcagcagggaagaaaatgacggtacctgactaagaagccccggctaactacgtgccagcagccgcggtaatacgtagggggcaagcgttatccggatttactgggtgtaaagggagcgtagacggcatggcaagccagatgtgaaaacccagggctcaaccttgggattgcatttggaactgccaggctggagtgcaggagaggtaagcggaattcctagtgtagcggtgaaatgcgtagatattaggaggaacaccagtggcgaaggcggcttactggactgtaactgacgttgaggctcgaaagcgtggggagcaaacaggattagataccctggtagtccacgcggtaaacgatgattgctaggtgtaggtgggtatggacccatcggtgccgcagctaacgcaataagcaatccacctggggagtacgttcgcaagaatgaaactcaaaggaattgacggggacccgcacagcggtggagcatgtgtttaattcgaagcaacgcgaagaaccttaccaagtcttgacatcccaatgacgcacctgtaaagaggtgttcccttcggggcaatggagacaggtggtgcatggttgtcgtcagctcgtgtcgtgagatgttgggttaagtcccgcaacgagcgcaacccttattcttagtagccagcaggtaaagctgggcactctaaggagactgccggggataacccggaggaaggcggggatgacgtcaaatcatcatgccccttatgatttgggctacacacgtgctacaatggcgtaaacaaagggaagcgagacagtgatgtggagcaaatcccagaaataacgtctcagttcggattgtagtctgcaactcgactacatgaagctggaatcgctagtaatcgcgaatcagcatgtcgcggtgaatacgttcccgggtcttgtacacaccgcccgtcacaccatgggagttggaaatgcccgaagtctgtgacctaaccgaaagggag

SEQ ID NO: 100 - DNA, 1358 bp, Artificial Sequence
  STR00135.1 Collinsella_aerofaciens_strain_JCM_10188_16S_ribosomal_RNA
  misc_feature (1111)..(1111): n is a, c, g, or t
  misc_feature (1113)..(1113): n is a, c, g, or t
  misc_feature (1129)..(1129): n is a, c, g, or t
  misc_feature (1202)..(1202): n is a, c, g, or t
  misc_feature (1236)..(1236): n is a, c, g, or t
ttgcttctttaccaggagtggcgaacgggtgagtaatacataagcaatctgcccatcggcctgggataacagttggaaacggctgctaataccggataggttagtctttggcatccgggactaattaaagttgggatacaacacggatggatgagcttatggcgtattatctagtaggtgaggtaacggcccacctatgcgatgatacttagccgacctgagagggtgaccggccacattgggactgagacacggcccaaactcctacgggaggcagcagtagggaattttcggcaatgggcgaaagcctgaccgagcaacgccgcgtgagtgaagaaggccttcgggttgtaaagctctgttgtgaaggaagaacggctcatagagggaatgctatgggagtgacggtactttaccaaagccacggctaactacgtgccagcagccgcggtaatacgtaggtggcgagcgttatccggaattattgggcgtaaagggtgcgcaggcggtttgaaaagtttaaggtgaaagcgtggggcttaaccccatacagccttagaaactgtcagactagagtacaggagagggcaatggaattccatgtgtagcggtaaaatgcgtagatatatggaggaacaccagtggcgaaggcggttgcctggcctgtaactgacgctcatgcacgaaagcgtggggagcaaataggattagataccctagtagtccacgccgtaaacgatgaaactaagtgttggggaaactcagtgctgcagttaacgcaataagttctccgcctggggagtatgcacgcaagtgtgaaactcagaggaattgacaggggcccgcacaagcggtggagtatgtggtttaattcgacgcgacgcgaaaagcgttttgagaagtttaaggtcaaagcatgggtataaacataatgcagcctttgaaatggatacaggtggtgcatggttgtcgtcagctcgtgtcgtgagatgttgggttaagtcccgcaacgagcgcaacccttgtctttagttactaacattaagttgaggactctagagagactgccggtgacaaaccggaggaaggtggggatgacgtcaaatcatcnancccttatgacctgggntacacacgtactacaatggcggatacaacgagaagcaagacagcaatgtggagcaaacctcagaaagtccgtntcagttcggattgaagtttgcaacccgacttcangaagccggaatcgctagtaatcgcggatcagcatgccgcggtgaatacgttctcgggccttgtacaccccgcccgtcaaaccatgagagttggcaatacccgaagccggtggcctaaccctg

SEQ ID NO: 101 - DNA, 1304 bp, Artificial Sequence
  STR00136.1 Collinsella_aerofaciens_strain_JCM_10188_16S_ribosomal_RNA
  misc_feature (10)..(10): n is a, c, g, or t
  misc_feature (115)..(115): n is a, c, g, or t
  misc_feature (832)..(832): n is a, c, g, or t
  misc_feature (869)..(869): n is a, c, g, or t
  misc_feature (1232)..(1232): n is a, c, g, or t
gaccggcgcnggggtgagtaacacgtatccaacctgccgataactcggggatagcctttcgaaagaaagattaatacccgatagtatagtatttccgcatggtttcgctattaangaatttcggttatcgatggggatgcgttccattagatagttggcggggtaacggcccaccaagtcaacgatggataggggttctgagaggaaggtcccccacattggaactgagacacggtccaaactcctacgggaggcagcagtgaggaatattggtcaatggacgagagtctgaaccagccaagtagcgtgaaggatgactgccctatgggttgtaaacttcttttatacgggaataaagtggagtatgcatactcctttgtatgtaccgtatgaataaggatcggctaactccgtgccagcagccgcggtaatacggaggatccgagcgttatccggatttattgggtttaaagggagcgtaggcgggtgcttaagtcattgtgaaagtttgcggctcaaccgtaaaattgcagttgatactgggcgccttgagtgcagcataggtaggcggaattcgtggtgtagcggtgaaatgcttagatatcacgaagaactccgattgcgaaggcagcttactggactgtaactgacgctgatgctcgaaagtgtgggtatcaaacaggattagataccctggtagtccacacagtaaacgatgaatactcgctgttggcgatacacagtcagcggccaagcgaaagcattaagtattccacctggggagtacgccggcaacggtgaaactcaaggaattgacgggggcccgcacacnggaagaaggaggagcttaactttatccggatttatgnagcttaacgggggcttaagtgggtgtggaatgtagtggaaacattacagccttcgggccgctgtgaaggtgctgcatggttgtcgtcagctcgtgccgtgaggtgtcggcttaagtgccataacgagcgcaacccttatctatagttactatcaggtcatgctgaggactctatggagactgccgtcgtaagatgtgaggaaggtggggatgacgtcaaatcagcacggcccttacgtccggggctacacacgtgttccaatggggggtacagaaggcagctacctggcgacaggatgctaatccctaaaacctctctcagttcggattggagtctgcaacccgactccatgaagctggattngctagtaatcgcgcatcagccacggcgcggtgaatacgttcccgggccttgtacacaccgcccgtcaagcca

SEQ ID NO: 102 - DNA, 1367 bp, Artificial Sequence
  STR00032.1 Collinsella_aerofaciens_strain_JCM_10188_16S_ribosomal_RNA
cgacggaacttgagagagcttgctttttcaagtttagtggcgaacgggtgagtaacgcgtgagtaacctgccctggagtgggggacaacagttggaaacgactgctaataccgcataagcccacggcaccgcatggtgctgagggaaaaggatttattcgcttcaggatggactcgcgtccaattagctagttggtgaggtaacggcccaccaaggcgacgattggtagccggactgagaggttgaacggccacattgggactgagacacggcccagactcctacgggaggcagcagtgggggatattgcacaatgggggaaaccctgatgcagcgacgccgcgtggaggaagaaggttttcggattgtaaactcctgtcgtacgggacgataatgacggtaccgtacaagaaagccacggctaactacgtgccagcagccgcggtaaaacgtaggtggcaagcgttgtccggaattactgggtgtaaagggagcgcaggcggaccggcaagttggaagtgaaatctatgggctcaacccataaattgctttcaaaactgctggccttgagtagtgcagaggtaggcggaattcccggtgtagcggtggaatgcgtagatatcgggaggaacaccagtggcgaaggcggcctactgggcaccaactgacgctgaggctcgaaagcatgggtagcaaacaggattagataccctggtagtccatgccgtaaacgatgattactaggtgttggaggattgaccccttcagtgccgcagttaacacaataagtaatccacctggggagtacgaccgcaaggttgaaactcaaaggaattgacgggggcccgcacaagcagtggagtatgtggtttaattcgaagcaacgcgaagaaccttaccgggtcttgacatccgatgcatagtgcagagatgcatgaagtccttcgggacatcaagacagcagaggtaggcttgtcgtcagctcgtgtcgtgagatgctgggataacggccggaacgagcgcaacccttattgccagttactacgcaagaggactctggcgagactgccgttgacaaaacggaggaaggtggggatgacgtcaaatcatcatgccctttatgacctgggctacacacgtactacaatggcgtttaacaaagagaagcaataccgcgaggtggagcaaaactcaaaaacaacgtctcagttcagattgcaggctgcaactcgcctgcatgaagtcggaattgctagtaatcgcggatcagcatgccgcggtgaatacgttcccgggccttgtacacaccgcccgtcacaccatgagagccggggggacccgaagtccgtagtctaaccgcaaggagg

SEQ ID NO: 103 - DNA, 1358 bp, Artificial Sequence
  STR00137 Collinsella_aerofaciens_strain_JCM_10188_16S_ribosomal_RNA
  misc_feature (884)..(884): n is a, c, g, or t
ggggttcgcttccgggtgagagtggcgaacgggtgagtaatgcgtgaccgacctgccccatacaccggaatagctcctggaaacgggtggtaatgccggatgctccggttggatgcatgtccttccgggaaagattctatcggtatgggatggggtcgcgtcctatcagcttgatggcggggtaacggcccaccatggcttcgacgggtagccggcctgagagggcgaccggccacattgggactgagatacggcccagactcctacgggaggcagcagtggggaatattgcacaatgggcgcaagcctgatgcagcgacgccgcgtgcgggatggaggccttcgggttgtaaaccgcttttgatcgggagcaagcccttcggggtgagtgtacctttcgaataagcaccggctaactacgtgccagcagccgcggtaatacgtagggtgcaagcgttatccggaattattgggcgtaaagggctcgtaggcggttcgtcgcgtccggtgtgaaagcccatcgcttaacggtgggtctgcgccgggtacgggcgggctggagtgcggtaggggagactggaattcccggtgtaacggtggaatgtgtagatatcgggaagaacaccaatggcgaaggcaggtctctgggccgtcactgacgctgaggagcgaaagcgtggggagcgaacaggattagataccctggtagtccacgccgtaaacggtggatgctggatgtggggcccgttccacgggttccgtgtcggagctaacgcgttaagcatcccgcctggggagtacggccgcaaggctaaaactcaaagaaattgacgggggcccgcacaagcggcggagcatgcggattaattcgatgcaacgcgaanaaccttacctgggcgggcgtaaatgcctcgtagccggttcgtcgcgtcccgcgtgaaggcgcgtcgcctaacggtgggtctgcgccgggtactcgtgtcgtgagatgttgggttaagtcccgcaacgagcgcaaccctcgccctgtgttgccagcacgtcatggtgggaactcacgggggaccgccggggtcaactcggaggaaggtggggatgacgtcagatcatcatgccccttacgtccagggcttcacgcatgctacaatggccggtacagcgggatgcgacatggcgacatggagcggatccctgaaaaccggtctcagttcggattggagtctgcaacccgactccatgaaggcggagtcgctagtaatcgcggatcagcaacgccgcggtgaatgcgttcccgggccttgtacacaccgcccgtcaagtcatgaaagtgggcagcacccgaagccggtggcctaacc

SEQ ID NO: 104 - DNA, 910 bp, Artificial Sequence
  STR00143.6 Collinsella_aerofaciens_strain_JCM_10188_16S_ribosomal_RNA
  misc_feature (105)..(105): n is a, c, g, or t
  misc_feature (158)..(158): n is a, c, g, or t
agccgcggtaatacgtagggggcaagcgttatccggatttactgggtgtaaagggagcgtagacggactggcaagtctgatgtgaaaggcgggggctcaaccccnggactgcattggaaactgttagtcttgagtgccggagaggtaagcggaattcntagtgtagcggtgaaatgcgtagatattaggaggaacaccagtggcgaaggcggcttactggacggtaactgacgttgaggctcgaaagcgtggggagcaaacaggattagataccctggtagtccacgccgtaaacgatgaatactaggtgttggggagcaaagctcttcggtgccgccgcaaacgcattaagtattccacctggggagtacgttcgcaagaatgaaactcaaaggaattgacggggacccgcacaagcggtggagcatgtggtttaattcgaagcaacgcgaagaaccttaccaagtcttgacatccctctgaccgactcttaaccgagtctttccttcgggacaggggagacaggtggtgcatggttgtcgtcagctcgtgtcgtgagatgttgggttaagtcccgcaacgagcgcaacccctatccccagtagccagcggttcggccgggcactctgaggagactgccagggataacctggaggaaggcggggatgacgtcaaatcatcatgccccttatgatttgggctacacacgtgctacaatggcgtaaacaaagggaagcaagcctgcgaaggtaagcaaatcccaaaaataacgtcccagttcggactgcagtctgcaactcgactgcacgaagctggaatcgctagtaatcgcggatcagaatgccgcggtgaatacgttcccgggtcttgtacacaccgcccgtcacaccatgggagtcagtaacgcccg

SEQ ID NO: 105 - DNA, 951 bp, Artificial Sequence
  STR00139.4 Collinsella_aerofaciens_strain_JCM_10188_16S_ribosomal_RNA
  misc_feature (54)..(54): n is a, c, g, or t
agccccggctaactacgtgccagcagccgcggtaatacgtagggggcaagcgtnatccggatttactgggtgtaaagggagcgtagacggcgatgcaagccagatgtgaaagcccggggctcaaccccgggactgcatttggaactgcgtggctggagtgtcggagaggcaggcggaattcctagtgtagcggtgaaatgcgtagatattaggaggaacaccagtggcgaaggcggcctgctggacgatgactgacgttgaggctcgaaagcgtggggagcaaacaggattagataccctggtagtccacgccgtaaacgatgactactaggtgtcgggtggcaaggccattcggtgccgcagcaaacgcaataagtagtccacctggggagtacgttcgcaagaatgaaactcaaaggaattgacggggacccgcacaagcggtggagcatgtggtttaattcgaagcaacgcgaagaaccttacctgatcttgacatcccgatgccaaagcgcgtaacgcgctctttcttcggaacatcggtgacaggtggtgcatggttgtcgtcagctcgtgtcgtgagatgttgggttaagtcccgcaacgagcgcaacccctatcttcagtagccagcatttcggatgggcactctggagagactgccagggacaacctggaggaaggtggggatgacgtcaaatcatcatgccccttatgaccagggctacacacgtgctacaatggcgtaaacaaagggaggcgaacccgcgagggtgggcaaatcccaaaaataacgtctcagttcggattgtagtctgcaactcgactacatgaagctggaatcgctagtaatcgcgaatcagaatgtcgcggtgaatacgttcccgggtcttgtacacaccgcccgtcacaccatgggagtcagtaacgcccgaagccggtgacccaacc

SEQ ID NO: 106 - DNA, 983 bp, Artificial Sequence
  STR00016 Collinsella_aerofaciens_strain_JCM_10188_16S_ribosomal_RNA
  misc_feature (950)..(950): n is a, c, g, or t
  misc_feature (952)..(952): n is a, c, g, or t
tcgagcgatgaagcttcttcggaagtggattagcggcggacgggtgagtaacacgtgggtaacctgcctcatagaggggaatagcctttcgaaaggaagattaataccgcataagattgtagtaccgcatggtacagcaattaaaggagtaatccgctatgagatggacccgcgtcgcattagctagttggtgaggtaacggctcaccaaggcgacgatgcgtagccgacctgagagggtgatcggccacattgggactgagacacggcccagactcctacgggaggcagcagtggggaatattgcacaatgggggaaaccctgatgcagcaacgccgcgtgagtgatgacggccttcgggttgtaaaactctgtctttggggacgataatgacggtacccaaggaggaagccacggctaactacgtgccagcagccgcggtaatacgtaggtggcaagcgttgtccggatttactgggcgtaaagggagcgtaggtggatatttaagtgggatgtgaaatactcgggcttaacctgggtgctgcattccaaactggatatctagagtgcaggagaggaaaggagaattcctagtgtagcggtgaaatgcgtagagattaggaagaataccagtggcgaaggcgcctttctggactgtaactgacactgaggctcgaaagcgtggggagcaaacaggattagataccctggtagtccacgccgtaaacgatgaatactaggtgtaggggttgtcatgacctctgtgccgccgctaacgcattaagtattccgcctggggagtacggtcgcaagattaaaactcaaaggaattgacgggggcccgcacaagcagcggagcatgtggtttaattcgaagcaacgcgaagaaccttacctagacttgacatctcctgaattactctgtaatggaggaagccacttcggtggcngnagacaggtggtgcatggttgtcgtcagctcg

SEQ ID NO: 107 - DNA, 1298 bp, Artificial Sequence
  STR00014 Collinsella_aerofaciens_strain_JCM_10188_16S_ribosomal_RNA
  misc_feature (46)..(46): n is a, c, g, or t
caccttgatttgattcttccgatgagaatcttggtgactgagtggnggacgggtgagtaacgcgtgggtaacctgcctcttacagggggataacagttataaatgactgctattaccgcataagaccacagcaccgcatggggcgggggtaaaaactccggtggggtgagatggacccccgtctgattatgtagttggtggggtaacggcctaccacgccgacaatcactagccgacctgagagggtgaccggccacattgggactgagacacggcccacactcctacgggaggcggcagtggggaatattgcgcaatgggggaaaccctgatgcgccgacaccgcgtgagcgatgaaatatttcggtatgtaaagggaaaagcaaacgaatactgccacaccgcggtaatactatggtgcagcgttatccggatttactgggtgtaaagggagcgtaacgagtggcaagtctgatgtgaaaacccggggctcaccccgggactgcttgaaactgtcaatctaagtaccggagaggtaacggaattcctatgtacggtgaaatgcgtaatattagaggacaccatggcgaaggcggttactgacgtaactgacgttgaggtcaaagcgtggggagcaaacaggattagataccctggtagtccacgccgtaaacgatgactactaggtgtcgggcagcaaagctgttcggtgccgcagcaaacgcaataagtagtccacctggggagtacgttcgcaagaatgaaactcaaaggaattgacggggacccgcacaagcggtggagcatgtggtttaattcgaagcaacgcgaagaaccttacctgctcttgacatctccctgaccggcaagtaatgttgcctttccttcgggacagggatgacaggtggtgcatggttgtcgtcagctcgtgtcgtgagatgttgggttaagtcccgcaacgagcgcaacccctatctttagtagccagcggtttggccgggcactctagagagactgccagggataacctggaggaaggtggggatgacgtcaaatcatcatgccccttatgagcagggctacacacgtgctacaatggcgtaaacaaagggaggcagaaccgcgaggtcgagcaaatcccaaaaataacgtctcagttcggattgtagtctgcaactcgactacatgaagctggaatcgctagtaatcgcgaatcagaatgtcgcggtgaatacgttcccgggtcttgtacacaccgcccgtcacaccatgggagtcagtaacgcccgaagtcagtg

SEQ ID NO: 108 - DNA, 1360 bp, Artificial Sequence
  STR00059 Collinsella_aerofaciens_strain_JCM_10188_16S_ribosomal_RNA
  misc_feature (18)..(18): n is a, c, g, or t
tcgaggggcagcgcgggnagtagcaatacatctcgccggcgaccggcgcacgggtgagtaacacgtgtgcaaccaaccccgtaccgggagataacccgcggaaacgtggactaacatcccataagactctagagccgcatggctctggatttaaaattccggtggtacgggacgggcacgcgcgacattaggtagttggcggggtaacggcccaccaagccgacgatgtctaggggttctgagaggaaggtcccccacactggaactgagacacggtccagactcctacgggaggcagcagtgaggaatattggtcaatgggcgagagcctgaaccagccaagtcgcgtgagggaagaatggtctatggcctgtaaacctcttttgtcaaggaagaataaaaggtacgtgtaccttcttgccagtacttgacgaataagcatcggctaactccgtgccagcagccgcggtaatacgggggatgcgagcgttatccggatttattgggtttaaagggcgcgtaggcgggacgccaagtcagcggtaaaagactgcagctaaactgtagcacgccgttgaaactggcgacctcgagacgagacgagggaggcggaacaagtgaagtagcggtgaaatgcttagatatcacttggaaccccgatagcgaaggcagcttcccaggctcgatctgacgctgatgcgcgagagcgtgggtagcgaacaggattagataccctggtagtccacgccgtaaacgatgctcactggatcttggcgatacactgccagggttcaagcgaaagtattaagtgagccacctggggagtacgtcggcaacgatgaaactcaaaggaattgacgggggcccgcacaagcggaggaacatgtggtttaattcgatgatacgcgaggaaccttacccgggtttaaatgtattttgcatttcttggaaacaggaattcccttcggggctagatacaaggtgctgcatggttgtcgtcagctcgtgccgtgaggtgtcgggttaagtcccataacgagcgcaacccctatcgccagttgccagcggctgaggccgggcactctgtcgagactgccaccgtaaggtgcgaggaaggcggggatgacgtcaaatcagcacggcccttacacccggggcgacacacgtgttacaatggccggtacagagggcagccacggggtgacccggagcgaatctctaaagccggtcgtagttcggactggagtctgcaacccgactccacgaagttggattcgctagtaatcgcgcatcagccatggcgcggtgaatacgttcccgggccttgtacacaccgcccgtcaagccatggaagccggga

SEQ ID NO: 109 - DNA, 1377 bp, Artificial Sequence
  STR00085 Collinsella_aerofaciens_strain_JCM_10188_16S_ribosomal_RNA
  misc_feature (438)..(438): n is a, c, g, or t
cataaggaacggattatttcggtaagaagtactttatgactgagtggcggacgggtgagtaacgcgtggataacctgcctcatacagggggataacagttagaaatgactgctaataccgcataagcgcacagtgctgcatggcacagtgtgaaaagctccggcggtatgagatggatccgcgtttgattagctagttggtggggtaaaggcctaccaaggcgacgatcaatagccgacctgagagggtgaccggccacattgggactgagacacggcccaaactcctacgggaggcagcagtggggaatattgcacaatgggggaaaccctgatgcagcgacgccgcgtgaaggaagaagtatttcggtatgtaaacttctatcagcagggaagaaaatgacggtacctgactaagaagccccggctaattacgtgnccagcagccgcggtaatacgtaaggggcaagcgttatccggatttactgggtgtaaagggagcgtagacggcagtgcaagtctgatgtgaaagcccggggctcaaccccgggactgcattggaaactgtgcagctagagtgtcggagaggtaagtggaattcctagtgtagcggtgaaatgcgtagatattaggaggaacaccagtggcgaaggcggcttactggacgataactgacgttgaggctcgaaagcgtggggagcaaacaggattagataccctggtagtccacgccgtaaacgatgaatactaggtgtcgggcgccaaaggcgttcggtgccgcagcaaacgcaataagtattccacctggggagtacgttcgcaagaatgaaactcaaaggaattgacggggacccgcacaagcggtggagcatgtggtttaattcgaagcaacgcgaagaaccttaccaagtcttgacatctgcctgaccggtccgtaacaggaccctttccttcgggacaggcaagacaggtggtgcatggttgtcgtcagctcgtgtcgtgagatgttgggttaagtcccgcaacgagcgcaacccttatccttagtagccagcaggtagagctgggcactctagggagactgccagggacaacctggaggaaggtggggatgacgtcaaatcatcatgccccttatgatttgggctacacacgtgctacaatggcgtaaacaaagggaggcgaaggggtgacctggagcaaatcccaaaaataacgtctcagttcggattgtagtctgcaactcgactacatgaagctggaatcgctagtaatcgcgaatcagaatgtcgcggtgaatacgttcccgggtcttgtacacaccgcccgtcacaccatgggagtcggatatgcccgaagccggtgaccgaacccgaaa

SEQ ID NO: 110 - DNA, 1338 bp, Artificial Sequence
  STR00005 Collinsella_aerofaciens_strain_JCM_10188_16S_ribosomal_RNA
acccctctccggagggaagcgagtggcgaacggctgagtaacacgtggagaacctgccccctcccccgggatagccgcccgaaaggacgggtaataccggataccccggggtgccgcatggcaccccggctaaagccccgacgggaggggatggctccgcggcccatcaggtagacggcggggtgacggcccaccgtgccgacaacgggtagccgggttgagagaccgaccggccagattgggactgagacacggcccagactcctacgggaggcagcagtggggaatcttgcgcaatggggggaaccctgacgcagcgacgccgcgtgcgggacggaggccttcgggtcgtaaaccgctttcagcagggaagagtcaagactgtacctgcagaagaagccccggctaactacgtgccagcagccgcggtaatacgtagggggcgagcgttatccggattcattgggcgtaaagcgcgcgtaggcggcccggcaggccgggggtcgaagcggggggctcaaccccccgaagcccccggaacctccgcggcttgggtccggtaggggagggtggaacacccggtgtagcggtggaatgcgcagatatcgggtggaacaccggtggcgaaggcggccctctgggccgagaccgacgctgaggcgcgaaagctgggggagcgaacaggattagataccctggtagtcccagccgtaaacgatggacgctaggtgtggggggacgatccccccgtgccgcagccaacgcattaagcgtcccgcctggggagtacggccgcaaggctaaaactcaaaggaattgacgggggcccgcacaagcagcggagcatgtggcttaattcgaagcaacgcgaagaaccttaccagggcttgacatatgggtgaagcgggggagaccccgtggccgagaggagcccatacaggtggtgcatggctgtcgtcagctcgtgtcgtgagatgttgggttaagtcccgcaacgagcgcaacccccgccgcgtgttgccatcgggtgatgccgggaacccacgcgggaccgccgccgtcaaggcggaggagggcggggacgacgtcaagtcatcatgccccttatgccctgggctgcacacgtgctacaatggccggtacagagggatgccaccccgcgagggggagcggatcccggaaagccggccccagttcggattgggggctgcaacccgcccccatgaagtcggagttgctagtaatcgcggatcagcatgccgcggtgaatgcgttcccgggccttgtacacaccgcccgtcacaccacccgagtcgtctgcacccgaagtcgccggcc

SEQ ID NO: 111 - DNA, 1384 bp, Artificial Sequence
  STR00101 Collinsella_aerofaciens_strain_JCM_10188_16S_ribosomal_RNA
  misc_feature (20)..(20): n is a, c, g, or t
  misc_feature (436)..(436): n is a, c, g, or t
tcgagcgaagcgctaagacnggatttcttcggattgaagtctttgtgactgagcggcggacgggtgagtaacgcgtgggtaacctgcctcatacagggggataacagttagaaatgactgctaataccgcataagcgcacaggaccgcatggtctggtgtgaaaaactccggtggtatgagatggacccgcgtctgattagctagttggaggggtaacggcccaccaaggcgacgatcagtagccggcctgagagggtgaacggccacattgggactgagacacggcccagactcctacgggaggcagcagtggggaatattgcacaatgggggaaaccctgatgcagcgacgccgcgtgaaggaagaagtatctcggtatgtaaacttctatcagcagggaagaaaatgacggtacctgactaagaagccccggnctaactacgtgccagcagccgcggtaatacgtagggggcaagcgttatccggatttactgggtgtaaagggagcgtagacggaagagcaagtctgatgtgaaaggctggggcttaaccccaggactgcattggaaactgttgttctagagtgccggagaggtaagcggaattcctagtgtagcggtgaaatgcgtagatattaggaggaacaccagtggcgaaggcggcttactggacggtaactgacgttgaggctcgaaagcgtggggagcaaacaggattagataccctggtagtccacgccgtaaacgatgaatactaggtgtcgggtggcaaagccattcggtgccgcagcaaacgcaataagtattccacctggggagtacgttcgcaagaatgaaactcaaaggaattgacggggacccgcacaagcggtggagcatgtggtttaattcgaagcaacgcgaagaaccttaccaagtcttgacatccctctgaccgtcccgtaacggggacttcccttcggggcagaggagacaggtggtgcatggttgtcgtcagctcgtgtcgtgagatgttgggttaagtcccgcaacgagcgcaacccttatccttagtagccagcacatgatggtgggcactctagggagactgccggggataacccggaggaaggcggggacgacgtcaaatcatcatgccccttatgatttgggctacacacgtgctacaatggcgtaaacaaagggaagcgagacagcgatgttgagcgaatcccaaaaataacgtcccagttcggactgcagtctgcaactcgactgcacgaagctggaatcgctagtaatcgcggatcagaatgccgcggtgaatacgttcccgggtcttgtacacaccgcccgtcacaccatgggagtcagtaacgcccgaagtcagtgacctaaccgaaa

SEQ ID NO: 112 - DNA, 1334 bp, Artificial Sequence
  STR00006 Collinsella_aerofaciens_strain_JCM_10188_16S_ribosomal_RNA
gacgagtggcggacgggtgagtaatgtctgggaaactgcctgatggagggggataactactggaaacggtagctaataccgcataacgtcgcaagaccaaagagggggaccttagggcctcttgccatcggatgtgcccagatgggattagctagtaggtggggtaacggctcacctaggcgacgatccctagctggtctgagaggatgaccagccacactggaactgagacacggtccagactcctacgggaggcagcagtggggaatattgcacaatgggcgcaagcctgatgcagccatgccgcgtgtatgaagaaggccttcgggttgtaaagtactttcagcggggaggaagggagtaaagttaatacctttgctcattgacgttacccgcagaagaagcaccggctaactccgtgccagcagccgcggtaatacggagggtgcaagcgttaatcggaattactgggcgtaaagcgcacgcaggcggtttgttaagtcagatgtgaaatccccgggctcaacctgggaactgcatctgatactggcaagcttgagtctcgtagaggggggtagaattccaggtgtagcggtgaaatgcgtagagatctggaggaataccggtggcgaaggcggccccctggacgaagactgacgctcaggtgcgaaagcgtggggagcaaacaggattagataccctggtagtccacgccgtaaacgatgtcgacttggaggttgtgcccttgaggcgtggcttccggagctaacgcgttaagtcgaccgcctggggagtacggccgcaaggttaaaactcaaatgaattgacgggggcccgcacaagcggtggagcatgtggtttaattcgatgcaacgcgaagaaccttacctggtcttgacatccacggaagttttcagagatgagaatgtgccttcgggaaccgtgagacaggtgctgcatggctgtcgtcagctcgtgttgtgaaatgttgggttaagtcccgcaacgagcgcaacccttatcctttgttgccagcggtccggccgggaactcaaaggagactgccagtgataaactggaggaaggtggggatgacgtcaagtcatcatggcccttacgaccagggctacacacgtgctacaatggcgcatacaaagagaagcgacctcgcgagagcaagcggacctcataaagtgcgtcgtagtccggattggagtctgcaactcgactccatgaagtcggaatcgctagtaatcgtggatcagaatgccacggtgaatacgttcccgggccttgtacacaccgcccgtcacaccatgggagtgggttgcaaa

SEQ ID NO: 113 - DNA, 1352 bp, Artificial Sequence
  STR00011 Collinsella_aerofaciens_strain_JCM_10188_16S_ribosomal_RNA
  misc_feature (19)..(19): n is a, c, g, or t
  misc_feature (917)..(917): n is a, c, g, or t
  misc_feature (930)..(931): n is a, c, g, or t
gcttcggcagatttaggcntcggtttctagtggcggacgggtgagtaacgcgtgggtaacctgccttatacagggggataacaaccagaaatggttgctaataccgcataagcgcacaggaccgcatggtccggtgtgaaaaactccggtggtataagatggacccgcgttggattagctagttggcagggtaacggcctaccaaggcgacgatccatagccggcctgagagggtgaacggccacattgggactgagacacggcccagactcctacgggaggcagcagtggggaatattgcacaatgggggaaaccctgatgcagcgacgccgcgtgaaggaagaagtatctcggtatgtaaacttctatcagcagggaagatagtgacggtacctgactaagaagccccggctaactacgtgccagcagccgcggtaatacgtagggggcaagcgttatccggatttactgggtgtaaagggagcgtagacggactggcaagtctgatgtgaaaggcgggggctcaacccctggactgcattggaaactgttagtcttgagtgccggagaggtaagcgggaattcctagtgtagcggtgaaatgcgtagatattaggaggaacaccagtggcgaaggcggcttactggacggtaactgacgttgaggctcgaaagcgtggggagcaaacaggattagataccctggtagtccacgccgtaaacgatgaatactaggtgttggggagcaaagctcttcggtgccgccgcaaacgcattaagtattccacctggggagtacgttcgcaagaatgaaactcaaaggaattgacggggacccgcacaagcggtggagcatgtggtttaattcgaagcaacgcgaagaaccttaccaagtcttgacatccctctgaccgtntccttaaccggannctttccttcgggacaggggagacaggtggtgcatggttgtcgtcagctcgtgtcgtgagatgttgggttaagtcccgcaacgagcgcaacccctatccccagtagccagcagtccggctgggcactctgaggagactgccagggataacctggaggaaggcggggatgacgtcaaatcatcatgccccttatgatttgggctacacacgtgctacaatggcgtaaacaaagggaagcaagcctgcgaaggtaagcaaatcccaaaaataacgtcccagttcggactgcagtctgcaactcgactgcacgaagctggaatcgctagtaatcgcggatcagaatgccgcggtgaatacgttcccgggtcttgtacacaccgcccgtcacaccatgggagtcagtaacgcccgaagtcagtgac

SEQ ID NO: 114 - DNA, 1335 bp, Artificial Sequence
  STR00077 Collinsella_aerofaciens_strain_JCM_10188_16S_ribosomal_RNA
  misc_feature (446)..(446): n is a, c, g, or t
tcggagaagagcggcggacgggtgagtaacgcgtgggtaacctgcctcatacacatggataacataccgaaaggtatgctaatacaggataacataagagattcgcatgtttctcttatcaaagctccggcggtatgagatggacccgcgtctgattagctagttggtaaggtaatggcttaccaaggcgacgatcagtagccgacctgagagggtgatcggccacattggaactgagacacggtccaaactcctacgggaggcagcagtggggaatattgcacaatgggcgaaagcctgatgcagcaacgccgcgtgagtgatgaaggccttcgggtcgtaaaactctgtcctcaaggaagataatgacggtacttgaggaggaagccccggctaactacgtgccagcagccgcggtaatacgtagggggctagcgttatccggnatttactgggcgtaaagggtgcgtaggtggtttcttaagtcaggagtgaaaggctacggcttaaccgtagtaagctcttgaaactgggaaacttgagtgcaggagaggaaagtggaattcctagtgtagcggtgaaatgcgtagatattaggaggaacaccagtagcgaaggcggctttctggactgtaactgacactgaggcacgaaagcgtggggagcaaacaggattagataccctggtagtccacgccgtaaacgatgagtactaggtgtcgggggttacccccctcggtgccgcagctaacgcattaagtactccgcctggggagtacgctcgcaagagtgaaactcaaaggaattgacggggacccgcacaagtagcggagcatgtggtttaattcgaagcaacgcgaagaaccttacctaagcttgacatccttttgaccgatgcctaatcgcatttttcccttcggggacagaagtgacaggtggtgcatggttgtcgtcagctcgtgtcgtgagatgttgggttaagtcccgcaacgagcgcaacccttgcctttagttgccagcattaagttgggcactctagagggactgccagggataacctggaggaaggtggggatgacgtcaaatcatcatgccccttatgcttagggctacacacgtgctacaatgggtggtacagagggcagccaagtcgtgaggccgagctaatcccttaaagccattctcagttcggattgtaggctgaaactcgcctacatgaagctggagttactagtaatcgcagatcagaatgctgcggtgaatgcgttcccgggtcttgtacacaccgcccgtcacaccacggaagttgggggcgcccgaagccacttagctaac

SEQ ID NO: 115 - DNA, 1370 bp, Artificial Sequence
  STR00091 Collinsella_aerofaciens_strain_JCM_10188_16S_ribosomal_RNA
  misc_feature (430)..(430): n is a, c, g, or t
  misc_feature (905)..(905): n is a, c, g, or t
  misc_feature (935)..(935): n is a, c, g, or t
agcgaagcacttaagtggatctcttcggattgaaacttatttgactgagcggcggacgggtgagtaacgcgtgggtaacctgcctcatacagggggataacagttagaaatggctgctaataccgcataagcgcacaggaccgcatggtctggtgtgaaaaactccggtggtatgagatggacccgcgtctgattagctagttggaggggtaacggcccaccaaggcgacgatcagtagccggcctgagagggtgaacggccacattgggactgagacacggcccagactcctacgggaggcagcagtggggaatattgcacaatgggggaaaccctgatgcagcgacgccgcgtgaaggaagaagtatctcggtatgtaaacttctatcagcagggaagaaaatgacggtacctgactaagaagccccnggctaactacgtgccagcagccgcggtaatacgtagggggcaagcgttatccggatttactgggtgtaaagggagcgtagacggaagagcaagtctgatgtgaaaggctggggcttaaccccaggactgcattggaaactgtttttctagagtgccggagaggtaagcggaattcctagtgtagcggtgaaatgcgtagatattaggaggaacaccagtggcgaaggcggcttactggacggtaactgacgttgaggctcgaaagcgtggggagcaaacaggattagataccctggtagtccacgccgtaaacgatgaatactaggtgtcgggtggcaaagccattcggtgccgcagcaaacgcaataagtattccacctggggagtacgttcgcaagaatgaaactcaaaggaattgacggggacccgcacaagcggtggagcatgtggtttaattcgaagcaacgcgaagaanccttaccaagtcttgacatccctctgaccnggcccgtaacggggccttcccttcggggcagaggagacaggtggtgcatggttgtcgtcagctcgtgtcgtgagatgttgggttaagtcccgcaacgagcgcaacccctatccttagtagccagcaggtgaagctgggcactctagggagactgccggggataacccggaggaaggcggggacgacgtcaaatcatcatgccccttatgatttgggctacacacgtgctacaatggcgtaaacaaagggaagcgagacagtgatgttgagcaaatcccaaaaataacgtcccagttcggactgcagtctgcaactcgactgcacgaagctggaatcgctagtaatcgcgaatcagaatgtcgcggtgaatacgttcccgggtcttgtacacaccgcccgtcacaccatgggagtcagtaacgcccgaagtcagtg

SEQ ID NO: 116 - DNA, 1314 bp, Artificial Sequence
  STR00067 Collinsella_aerofaciens_strain_JCM_10188_16S_ribosomal_RNA
  misc_feature (47)..(47): n is a, c, g, or t
  misc_feature (398)..(398): n is a, c, g, or t
  misc_feature (1207)..(1207): n is a, c, g, or t
  misc_feature (1258)..(1258): n is a, c, g, or t
gcacccctgacggagttttcggacaacgaaagggaatgcttagtggnggacgggtgagtaacgcgtgagtaacctgccttggagtggggaataacagccggaaacggctgctaataccgcatgatgtatctggatcgcatggttctggataccaaagatttatcgctctgagatggactcgcgtctgattagctagttggtgaggtaacggctcaccaaggcgacgatcagtagccggactgagaggttggccggccacattgggactgagacacggcccagactcctacgggaggcagcagtggggaatattgggcaatgggcgaaagcctgacccagcaacgccgcgtgaaggaagaaggccctcgggttgtaaacttcttttgtcagggacgaangcaagtgacggtaccttgacgaataagccacggctaactacgtgccagcagccgcggtaatacgtaggtggcaagcgttatccggatttactgggtgtaaagggcgtgtaggcgggagtgcaagtcagatgtgaaaactatgggctcaacccatagcctgcatttgaaactgtacttcttgagtgatggagaggcaggcggaattccctgtgtagcggtgaaatgcgtagatatagggaggaacaccagtggcgaaggcggcctgctggacattaactgacgctgaggcgcgaaagcgtggggagcaaacaggattagataccctggtagtccacgccgtaaacgatggatactaggtgtggggggtctgaccccctccgtgccgcagttaacacaataagtatcccacctggggagtacgatcgcaaggttgaaactcaaaggaattgacgggggcccgcacaagcggtggagtatgtggtttaattcgaagcaacgcgaagaaccttaccaggacttgacatcctactaacgaagcagagatgcataaggtgcccttcggggaaagtagagacaggtggtgcatggttgtcgtcagctcgtgtcgtgagatgttgggttaagtcccgcaacgagcgcaacccttattgttagttgctacgcaagagcactctagcgagactgccgttgacaaaacggaggaaggtggggacgacgtcaaatcatcatgccccttatgtcctgggccacacacgtactacaatggcggtcaacagagggaagcaaagccgcgaggtggagcaaatccntaaaagccgtcccagttcggattgcaggctgaaactcgcctgtatgaagtnggaatcgctagtaatcgcggatcagcatgccgcggtgaatacgttcccgggccttg

SEQ ID NO: 117 - DNA, 1350 bp, Artificial Sequence
  STR00079 Collinsella_aerofaciens_strain_JCM_10188_16S_ribosomal_RNA
  misc_feature (937)..(942): n is a, c, g, or t
actgagtggcggacgggtgagtaacgcgtgggtaacctgcctcacacagggggatagcagttggaaacggctgataataccgcataagcgcacagtaccgcatggtacagtgtgaaaaactccggtggtgtgagatggacccgcgtctgattagcttgttggcagggtaacggcctaccaaggcaacgatcagtagccgacctgagagggtgaccggccacattgggactgagacacggcccagactcctacgggaggcagcagtggggaatattgcacaatggaggaaactctgatgcagcgacgccgcgtgagtgaagaagtaattcgttatgtaaagctctatcagcagggaagatagtgacggtacctgactaagaagctccggctaaatacgtgccagcagccgcggtaatacgtatggagcaagcgttatccggatttactgggtgtaaagggagtgtaggtggcatcacaagtcagaagtgaaagcccggggctcaaccccgggactgcttttgaaactgtggagctggagtgcaggagaggcaagtggaattcctagtgtagcggtgaaatgcgtagatattaggaggaacaccagtggcgaaggcggcttgctggactgtaactgacactgaggctcgaaagcgtggggagcaaacaggattagataccctggtagtccacgccgtaaacgatgaatactaggtgtcggggctcataagagcttcggtgccgcagcaaacgcaataagtattccacctggggagtacgttcgcaagaatgaaactcaaaggaattgacggggacccgcacaagcggtggagcatgtggtttaattcgaagcaacgcgaagaaccttaccaagtcttgacatcctcttgcccggtcagtaatgtgaccttttcttcggaacaagagtgacaggtggtgnnnnnncatggttgtcgtcagctcgtgtcgtgagatgttgggttaagtcccgcaacgagcgcaacccctattcttagtagccagcatttaaggtgggcactctaggaagactgccagggataacctggaggaaggtggggatgacgtcaaatcatcatgccccttatgacttgggctacacacgtgctacaatggcgtaaacaaagtgaagcgagagtgtgagcttaagcaaatcacaaaaataacgtctcagttcggattgtagtctgcaactcgactacatgaagctggaatcgctagtaatcgcgaatcagaatgtcgcggtgaatacgttcccgggtcttgtacacaccgcccgtcacaccatgggagtcggaaatgcccgaagtcggtgacctaacgaaagaaggagcc

SEQ ID NO: 118 - DNA, 1334 bp, Artificial Sequence
  STR00089 Collinsella_aerofaciens_strain_JCM_10188_16S_ribosomal_RNA
ttctcttcggagaagagcggcggacgggtgagtaacgcgtgggtaacctgcctcatacacatggataacataccgaaaggtatgctaatacaggataacataagagattcgcatgtttctcttatcaaagctccggcggtatgagatggacccgcgtctgattagctagttggtaaggtaatggcttaccaaggcgacgatcagtagccgacctgagagggtgatcggccacattggaactgagacacggtccaaactcctacgggaggcagcagtggggaatattgcacaatgggcgaaagcctgatgcagcaacgccgcgtgagtgatgaaggccttcgggtcgtaaaactctgtcctcaaggaagataatgacggtacttgaggaggaagccccggctaactacgtgccagcagccgcggtaatacgtagggggctagcgttatccgggatttactgggcgtaaagggtgcgtaggtggtttcttaagtcaggagtgaaaggctacggcttaaccgtagtaagctcttgaaactgggaaacttgagtgcaggagaggaaagtggaattcctagtgtagcggtgaaatgcgtagatattaggaggaacaccagtagcgaaggcggctttctggactgtaactgacactgaggcacgaaagcgtggggagcaaacaggattagataccctggtagtccacgccgtaaacgatgagtactaggtgtcgggggttacccccctcggtgccgcagctaacgcattaagtactccgcctggggagtacgctcgcaagagtgaaactcaaaggaattgacggggacccgcacaagtagcggagcatgtggtttaattcgaagcaacgcgaagaaccttacctaagcttgacatccttttgaccgatgcctaatcgcatttttcccttcggggacagaagtgacaggtggtgcatggttgtcgtcagctcgtgtcgtgagatgttgggttaagtcccgcaacgagcgcaacccttgcctttagttgccagcattaagttgggcactctagagggactgccagggataacctggaggaaggtggggatgacgtcaaatcatcatgccccttatgcttagggctacacacgtgctacaatgggtggtacagagggcagccaagtcgtgaggccgagctaatcccttaaagccattctcagttcggattgtaggctgaaactcgcctacatgaagctggagttactagtaatcgcagatcagaatgctgcggtgaatgcgttcccgggtcttgtacacaccgcccgtcacaccacggaagttgggggcgcccgaagccactt

SEQ ID NO: 119 - DNA, 1276 bp, Artificial Sequence
  STR00068 Collinsella_aerofaciens_strain_JCM_10188_16S_ribosomal_RNA
  misc_feature (13)..(13): n is a, c, g, or t
  misc_feature (874)..(875): n is a, c, g, or t
gataacccggcgnaagtcggacgaataccgcgtgaagcaggggccccgcatggggatatttgctaaagattcatcgctgatagataggcatgcgttccattaggcagttggcggggtaacggcccaccaaaccgacgatggataggggttctgagaggaaggtcccccacattggtactgagacacggaccaaactcctacgggaggcagcagtgaggaatattggtcaatgggcgtaagcctgaaccagccaagtcgcgtgagggatgaaggttctatggatcgtaaacctcttttataagggaataaagtgcgggacgtgtcccgttttgtatgtaccttatgaataaggatcggctaactccgtgccagcagccgcggtaatacggaggatccgagcgttatccgggatttattgggtttaaagggtgcgtaggcggccttttaagtcagcggtgaaagtctgtggctcaaccatagaattgccgttgaaactgggaggcttgagtatgtttgaggcaggcggaatgcgtggtgtagcggtgaaatgcttagatatcacgcagaaccccgattgcgaaggcagcctgccaagccatgactgacgctgatgcacgaaagcgtggggatcaaacaggattagataccctggtagtccacgcagtaaacgatgatcactagctgtttgcgatacacagtaagcggcacagcgaaagcgttaagtgatccacctggggagtacgccggcaacggtgaaactcaaaggaattgacgggggcccgcacaagcggaggaacatgtggtttaattcgatgatacgcgaggaaccttacccgggtttgaacgcattcggaccgaggtggaaacacctttnntctagcaatagccgtttgcgaggtgctgcatggttgtcgtcagctcgtgccgtgaggtgtcggcttaagtgccataacgagcgcaacccttgccactagttactaacaggtgatgctgaggactctggtgggactgccagcgtaagctgcgaggaaggcggggatgacgtcaaatcagcacggcccttacatccggggcgacacacgtgttacaatggcgtggacaaagggaagccacctggcgacagggagcgaatccccaaaccacgtctcagttcggatcggagtctgcaacccgactccgtgaagctggattcgctagtaatcgcgcatcagccatggcgcggtgaatacgttcccgggccttgtacacaccgcccgtcaagccatgggagccgggg

SEQ ID NO: 120 - DNA, 1369 bp, Artificial Sequence
  STR00043 Collinsella_aerofaciens_strain_JCM_10188_16S_ribosomal_RNA
  misc_feature (416)..(416): n is a, c, g, or t
  misc_feature (755)..(759): n is a, c, g, or t
  misc_feature (914)..(914): n is a, c, g, or t
  misc_feature (935)..(935): n is a, c, g, or t
  misc_feature (943)..(943): n is a, c, g, or t
  misc_feature (957)..(958): n is a, c, g, or t
  misc_feature (960)..(963): n is a, c, g, or t
  misc_feature (965)..(966): n is a, c, g, or t
ttattgaaacttcggtcgatttaatttaattctagtggcggacgggtgagtaacgcgtgggtaacctgccttatacagggggataacagtcagaaatggctgctaataccgcataagcgcacagagctgcatggctcagtgtgaaaaactccggtggtataagatggacccgcgttggattagcttgttggtggggtaacggcccaccaaggcgacgatccatagccggcctgagagggtgaacggccacattgggactgagacacggcccagactcctacgggaggcagcagtggggaatattgcacaatgggggaaaccctgatgcagcgacgccgcgtgaaggaagaagtatctcggtatgtaaacttctatcagcagggaagatagtgacggtacctgactaagaagccccnggctaactacgtgccagcagccgcggtaatacgtagggggcaagcgttatccggatttactgggtgtaaagggagcgtagacggtgtggcaagtctgatgtgaaaggcatgggctcaacctgtggactgcattggaaactgtcatacttgagtgccggaggggtaagcggaattcctagtgtagcggtgaaatgcgtagatattaggaggaacaccagtggcgaaggcggcttactggacggtaactgacgttgaggctcgaaagcgtggggagcaaacaggattagataccctggtagtccacgccgtaaacgatgaatactaggtgtcggggggcannnnncttcggtgccgtcgcaaacgcagtaagtattccacctggggagtacgttcgcaagaatgaaactcaaaggaattgacggggacccgcacaagcggtggagcatgtggtttaattcgaagcaacgcgaagaaccttaccaagtcttgacatccctnctgaccggatccttaatcggnaccttttncttcgggacagagnnannnnanngagacaggtggtgcatggttgtcgtcagctcgtgtcgtgagatgttgggttaagtcccgcaacgagcgcaacccctatcctcagtagccagcatttaaggtgggcactctggggagactgccagggataacctggaggaaggcggggatgacgtcaaatcatcatgccccttatgatttgggctacacacgtgctacaatggcgtaaacaaagggaagcgagattgtgagatggagcaaatcccaaaaataacgtcccagttcggactgtagtctgcaacccgactacacgaagctggaatcgctagtaatcgcggatcagaatgccgcggtgaatacgttcccgggtcttgtacacaccgcccgtcacaccatgggagtcagtaacgcccgaagtcagtgac

SEQ ID NO: 121 - DNA, 1379 bp, Artificial Sequence
  STR00070 Collinsella_aerofaciens_strain_JCM_10188_16S_ribosomal_RNA
  misc_feature (1323)..(1323): n is a, c, g, or t
cacccttgactgaggtttcggccaaatgataggaatgcttagtggcggactggtgagtaacgcgtgaggaacctaccttccagagggggacaacagttggaaacgactgctaataccgcatgacgcatgaccggggcatcccgggcatgtcaaagattttatcgctggaagatggcctcgcgtctgattagctagatggtggggtaacggcccaccatggcgacgatcagtagccggactgagaggttgaccggccacattgggactgagatacggcccagactcctacgggaggcagcagtggggaatattgggcaatggacgcaagtctgacccagcaacgccgcgtgaaggaagaaggctttcgggttgtaaacttcttttgtcagggaagagtagaagacggtacctgacgaataagccacggctaactacgtgccagcagccgcggtaatacgtaggtggcaagcgttgtccggatttactgggtgtaaagggcgtgcagccgggccggcaagtcagatgtgaaatctggaggcttaacctccaaactgcatttgaaactgtaggtcttgagtaccggagaggttatcggaattccttgtgtagcggtgaaatgcgtagatataaggaagaacaccagtggcgaaggcggataactggacggcaactgacggtgaggcgcgaaagcgtggggagcaaacaggattagataccctggtagtccacgctgtaaacgatggatactaggtgtgcggggactgaccccctgcgtgccgcagttaacacaataagtatcccacctggggagtacgatcgcaaggttgaaactcaaaggaattgacgggggcccgcacaagcggtggattatgtggtttaattcgaagcaacgcgaagaaccttaccagggcttgacatcctactaacgaagtagagatacatcaggtgcccttcggggaaagtagagacaggtggtgcatggttgtcgtcagctcgtgtcgtgagatgttgggttaagtcccgcaacgagcgcaacccctattgttagttgctacgcaagagcactctagcgagactgccgttgacaaaacggaggaaggtggggacgacgtcaaatcatcatgccccttatgtcctgggctacacacgtaatacaatggcggtcaacagagggaggcaaagccgcgaggcagagcaaacccccaaaagccgtcccagttcggatcgcaggctgcaacccgcctgcgtgaagtcggaatcgctagtaatcgcggatcagcatgccgcggtgaatacgttcccgggccttgtacacaccgcccntcacaccatgagagtcgggaacacccgaagtccgtagcctaaccgcaaggagggcg

SEQ ID NO: 122 - DNA, 1350 bp, Artificial Sequence
  STR00044 Collinsella_aerofaciens_strain_JCM_10188_16S_ribosomal_RNA
  misc_feature (20)..(20): n is a, c, g, or t
  misc_feature (39)..(41): n is a, c, g, or t
  misc_feature (983)..(983): n is a, c, g, or t
tgatttcctatttgagtggngggcggacgggtgagtaannngtgggtaacctgcctcatacagggggataacagttagaaatgactgctaataccgcataagaccacagcaccgcatggtgcaggggtaaaaactccggtggtatgagatggacccgcgtctgattagttagttggtggggtaacggcctaccaaggcgacgatcagtagccgacctgagagggtgaccggccacattgggactgagacacggcccaaactcctacgggaggcagcagtggggaatattgcacaatgggggaaaccctgatgcagcgacgccgcgtgagcgaagaagtatttcggtatgtaaagctctatcagcagggaagaaaatgacggtacctgactaagaagccccggctaactacgtgccagcagccgcggtaatacgtagggggcaagcgttatccggatttactgggtgtaaagggagcgtagacggagcagcaagtctgatgtgaaaacccggggctcaaccccgggactgcattggaaactgttgatctggagtgccggagaggtaagcggaattcctagtgtagcggtgaaatgcgtagatattaggaggaacaccagtggcgaaggcggcttactggacggtaactgacgttgaggctcgaaagcgtggggagcaaacaggattagataccctggtagtccacgccgtaaacgatgactactaggtgtcgggtggcaaagccattcggtgccgcagccaacgcaataagtagtccacctggggagtacgttcgcaagaatgaaactcaaaggaattgacggggacccgcacaagcggtggagcatgtggtttaattcgaagcaacgcgaagaaccttacctgctcttgacatcccggtgacggcagagtaatgtctgcttttcttcggaacaccggtgacaggtggtgcatggttgtcgtcagctcgtgtcgtgagatgttngggttaagtcccgcaacgagcgcaacccctatcttcagtagccagcggtaaggccgggcactctggagagactgccagggataacctggaggaaggtggggatgacgtcaaatcatcatgccccttatgagcagggctacacacgtgctacaatggcgtaaacaaagggaagcgaacccgcgagggtgggcaaatcccaaaaataacgtctcagttcggattgtagtctgcaactcgactacatgaagctggaatcgctagtaatcgcgaatcagaatgtcgcggtgaatacgttcccgggtcttgtacacaccgcccgtcacaccatgggagtcagtaacgcccgaagtcagtgacccaaccgtaa

SEQ ID NO: 123 - DNA, 1377 bp, Artificial Sequence
  STR00080 Collinsella_aerofaciens_strain_JCM_10188_16S_ribosomal_RNA
cactttatttgatttccttcgggactgattattttgtgactgagtggcggacgggtgagtaacgcgtgggtaacctgccttgtacagggggataacagttggaaacggctgctaataccgcataagcgcacagcatcgcatgatgcagtgtgaaaaactccggtggtataagatggacccgcgttggattagctagttggtgaggtaacggcccaccaaggcgacgatccatagccgacctgagagggtgaccggccacattgggactgagacacggcccaaactcctacgggaggcagcagtggggaatattgcacaatgggcgaaagcctgatgcagcgacgccgcgtgagcgaagaagtatttcggtatgtaaagctctatcagcagggaagataatgacggtacctgactaagaagcaccggctaaatacgtgccagcagccgcggtaatacgtatggtgcaagcgttatccggatttactgggtgtaaagggagcgcaggcggtgcggcaagtctgatgtgaaagcccggggctcaaccccggtactgcattggaaactgtcgtactagagtgtcggaggggtaagcggaattcctagtgtagcggtgaaatgcgtagatattaggaggaacaccagtggcgaaggcggcttactggacgataactgacgctgaggctcgaaagcgtggggagcaaacaggattagataccctggtagtccacgccgtaaacgatgaatactaggtgttgggaagcattgcttctcggtgccgtcgcaaacgcagtaagtattccacctggggagtacgttcgcaagaatgaaactcaaaggaattgacggggacccgcacaagcggtggagcatgtggtttaattcgaagcaacgcgaagaaccttaccaagtcttgacatccttctgaccggtacttaaccgtaccttctcttcggagcaggagtgacaggtggtgcatggttgtcgtcagctcgtgtcgtgagatgttgggttaagtcccgcaacgagcgcaacccttatctttagtagccagcggttcggccgggcactctagagagactgccagggataacctggaggaaggcggggatgacgtcaaatcatcatgccccttatgacttgggctacacacgtgctacaatggcgtaaacaaagggaagcaaagctgtgaagccgagcaaatctcaaaaataacgtctcagttcggactgtagtctgcaacccgactacacgaagctggaatcgctagtaatcgcagatcagaatgctgcggtgaatacgttcccgggtcttgtacacaccgcccgtcacaccatgggagttgggaatgcccgaagccagtgacctaaccgaaaggaa

SEQ ID NO: 124 - DNA, 1355 bp, Artificial Sequence
  STR00099 Collinsella_aerofaciens_strain_JCM_10188_16S_ribosomal_RNA
  misc_feature (938)..(942): n is a, c, g, or t
ccttcggggtggattagcggcggacgggtgagtaacacgtgggtaacctgccttgtagagggggatagccttccgaaaggaagattaataccgcataacatctttttatcgcatggtagaaagatcaaaggagcaatccgctacaagatggacccgcggcgcattagctagttggtgaggtaacggctcaccaaggcgacgatgcgtagccgacctgagagggtgatcggccacattggaactgagacacggtccagactcctacgggaggcagcagtggggaatattgcgcaatgggggaaaccctgacgcagcaacgccgcgtgaatgaagaaggccttagggttgtaaagttctgtttacggggacgataatgacggtacccgtggaggaagccacggctaactacgtgccagcagccgcggtaatacgtaggtggcaagcgttgtccggatttactgggcgtaaaggatgcgtaggcggatgtttaagtgagatgtgaaatacccgggctcaacttgggtgctgcatttcaaactggacatctagagtgcgggagaggaaagcggaattcctagtgtagcggtgaaatgcgtagagattaggaagaacaccagtggcgaaggcggctttctggaccgtaactgacgctgaggcatgaaagcgtggggagcaaacaggattagataccctggtagtccacgccgtaaacgatgaatactaggtgtaggaggtatcgactccttctgtgccgcagttaacacaataagtattccgcctgggaagtacgatcgcaagattaaaactcaaaggaattgacgggggcccgcacaagcagcggagcatgtggtttaattcgaagcaacgcgaagaaccttacctagacttgacatctcctgaattacccttaatcggggaagcccttcggggcaggaagnnnnnacaggtggtgcatggttgtcgtcagctcgtgtcgtgagatgttgggttaagtcccgcaacgagcgcaacccttatcattagttgctaccattaagttgagcactctagtgagactgccacggttaacgtggaggaaggtggggatgacgtcaaatcatcatgccccttatgtctagggctacacacgtgctacaatggtgaatacaaatagatgcaataccgcgaggtggagccaaactataaaattcatcccagttcggattgcagtctgaaactcgactgcatgaagccggagttgctagtaatcgcgaatcagcatgtcgcggtgaatacgttcccgggccttgtacacaccgcccgtcacaccatgagagctggtaacacccgaagtccgtgaggtaaccgcaaggagc

SEQ ID NO: 125 - DNA, 1376 bp, Artificial Sequence
  STR00063 Collinsella_aerofaciens_strain_JCM_10188_16S_ribosomal_RNA
  misc_feature (46)..(46): n is a, c, g, or t
  misc_feature (781)..(781): n is a, c, g, or t
ggagctgttttctctgaagttttcggatggaagagagttcagcttngtggcgaacgggtgagtaacacgtgagcaacctgcctttcagtgggggacaacatttggaaacgaatgctaataccgcataagaccacagtgtcgcatggcacaggggtcaaaggatttatccgctgaaagatgggctcgcgtccgattagctagatggtgaggtaacggcccaccatggcgacgatcggtagccggactgagaggttgaacggccacattgggactgagacacggcccagactcctacgggaggcagcagtggggaatattgcacaatgggggaaaccctgatgcagcgacgccgcgtggaggaagaaggtcttcggattgtaaactcctgtcccaggggacgataatgacggtaccctgggaggaagcaccggctaactacgtgccagcagccgcggtaaaacgtagggtgcaagcgttgtccggaattactgggtgtaaagggagcgcaggcggattggcaagttgggagtgaaatctatgggctcaacccataaattgctttcaaaactgtcagtcttgagtggtgtagaggtaggcggaattcccggtgtagcggtggaatgcgtagatatcgggaggaacaccagtggcgaaggcggcctactgggcactaactgacgctgaggctcgaaagcatgggtagcaaacaggattagataccctggtagtccatgccgtaaacgatgattactaggtgtgggaggattgaccccttccgtgnccgcagttaacacaataagtaatccacctggggagtacgaccgcaaggttgaaactcaaaggaattgacgggggcccgcacaagcagtggagtatgtggtttaattcgaagcaacgcgaagaacccttaccaggtcttgacatcggatgcatacctaagagattagggaagtccttcgggacatccagacaggtggtgcatggttgtcgtcagctcgtgtcgtgagatgttgggttaagtcccgcaacgagcgcaacccttatcgttagttactacgcaagaggactctagcgagactgccgttgacaaaacggaggaaggtggggatgacgtcaaatcatcatgccctttatgacctgggctacacacgtactacaatggctattaacagagagaagcgataccgcgaggtggagcaaacctcacaaaaatagtctcagttcggatcgcaggctgcaacccgcctgcgtgaagccggaattgctagtaatcgcggatcagcatgccgcggtgaatacgttcccgggccttgtacacaccgcccgtcacaccatgagagccggggggacccgaagtcggtagtctaaccgtaagg

SEQ ID NO: 126 - DNA, 1333 bp, Artificial Sequence
  STR00066 Collinsella_aerofaciens_strain_JCM_10188_16S_ribosomal_RNA
  misc_feature (23)..(23): n is a, c, g, or t
  misc_feature (27)..(28): n is a, c, g, or t
  misc_feature (1304)..(1304): n is a, c, g, or t
cgggatgaagcatttgtgacttngtgnnggacgggtgagtaacgcgtgggtaacctgccttatacagggggataacagttagaaatgactgctaataccgcataagcgcacagtctcgcatgggacagtgtgaaaaactatggtggtataagatggacccgcgtctgattagctagttggtggggtaaaggcctaccaaggcgacgatcagtagccgacctgagagggtgatcggccacattgggactgagacacggcccaaactcctacgggaggcagcagtggggaatattgcacaatgggggaaaccctgatgcagcaacgccgcgtgaaggaagaagtatctcggtatgtaaacttctatcagcagggaagaaaatgacggtacctgactaagaagctccggctaaatacgtgccagcagccgcggtaatacgtatggagcaagcgttatccggatttactgggtgtaaagggagcgtaggcggttatgcaagtcagatgtgaaagcccggggcttaaccccgggactgcatttgaaactgtgtaactagagtgtcggagaggtaagtggaattcctagtgtagcggtgaaatgcgtagatattaggaggaacaccagtggcgaaggcggcttactggacgataactgacgctgaggctcgaaagcgtggggagcaaacaggattagataccctggtagtccacgccgtaaacgatgaatactaggtgttggggagcaaagctcttcggtgccgcagcaaacgcaataagtattccacctggggagtacgttcgcaagaatgaaactcaaaggaattgacggggacccgcacaagcggtggagcatgtggtttaattcgaagcaacgcgaagaaccttaccaagtcttgacatctggatgaccggtccgtaatgggaccttcccttcggggcatccaagacaggtggtgcatggttgtcgtcagctcgtgtcgtgagatgttgggttaagtcccgcaacgagcgcaacccttatccttagtagccagcagtaagatgggcactctagggagactgccggagacaatccggaggaaggtggggatgacgtcaaatcatcatgccccttatgacttgggctacacacgtgctacaatggcgtaaacaaagggaagcgagaccgcgaggttaagcaaatctcaaaaataacgtctcagttcggattgtagtctgcaactcgactacatgaagctggaatcgctagtaatcgcgaatcagcatgtcgcggtgaatacgttcccgggtcttgtacacaccgcccntcacaccatgggagtcgataacgcccgaa

SEQ ID NO: 127 - DNA, 1335 bp, Artificial Sequence
  STR00102 Collinsella_aerofaciens_strain_JCM_10188_16S_ribosomal_RNA
  misc_feature (21)..(21): n is a, c, g, or t
acgggtgagtaacgcggtggnataacctgcctcacactgggggataacagttagaaatgactgctaataccgcataagcgcacagtaccgcatggtacggtgtgaaaaactccggtggtgtgagatggatccgcgtctgattagccagttggcggggtaacggcccaccaaagcgacgatcagtagccgacctgagagggtgaccggccacattgggactgagacacggcccaaactcctacgggaggcagcagtggggaatattgcacaatgggcgaaagcctgatgcagcgacgccgcgtgagtgaagaagtatttcggtatgtaaagctctatcagcagggaagaaaatgacggtacctgactaagaagccccggctaactacgtgccagcagccgcggtaatacgtagggggcaagcgttatccggatttactgggtgtaaagggagcgtagacggcgaagcaagtctgaagtgaaaacccagggctcaaccctgggactgctttggaaactgttttgctagagtgtcggagaggtaagtggaattcctagtgtagcggtgaaatgcgtagatattaggaggaacaccagtggcgaaggcggcttactggacgataactgacgttgaggctcgaaagcgtggggagcaaacaggattagataccctggtagtccacgccgtaaacgatgaatgctaggtgttgggggggcaaagcccttcggtgccgtcgcaaacgcagtaagcattccacctggggagtacgttcgcaagaatgaaactcaaaggaattgacggggacccgcacaagcggtggagcatgtggtttaattcgaagcaacgcgaagaaccttaccaagtcttgacatccttttgaccggcgtgtaacggcgccttcccttcggggcaagagagacaggtggtgcatggttgtcgtcagctcgtgtcgtgagatgttgggttaagtcccgcaacgagcgcaacccttatccttagtagccagcaggtagagctgggcactctagggagactgccagggataacctggaggaaggtggggatgacgtcaaatcatcatgccccttatgatttgggctacacacgtgctacaatggcgtaaacaaagggaagcaagacagtgatgtggagcaaatcccaaaaataacgtcccagttcggactgtagtctgcaacccgactacacgaagctggaatcgctagtaatcgcgaatcagaatgtcgcggtgaatacgttcccgggtcttgtacacaccgcccgtcacaccatgggagtcagcaacgcccgaagtcagtgacccaactcgcaagagaggg

SEQ ID NO: 128 - DNA, 1361 bp, Artificial Sequence
  STR00060 Collinsella_aerofaciens_strain_JCM_10188_16S_ribosomal_RNA
  misc_feature (41)..(42): n is a, c, g, or t
agcaatgctcgagtggcgaacgggtgagtaatacataagtnncctgccctagacagggggataactgctggaaacggcagctaagaccgcataggtatggacactgcatggtgaccatattaaaagtgccaaggcactggtagaggatggacttatggcgcattagctggttggtgaggtaacggctcaccaaggcgacgatgcgtagccgacctgagagggtgaccggccacactgggactgagacacggcccagactcctacgggaggcagcagtagggaattttcggcaatggggggaaccctgaccgagcaacgccgcgtgaaggaagaaggaattcgttctgtaaacttctgttataaaggaagaacggcggatatagggaatgatatccgagtgacggtactttatgagaaagccacggctaactacgtgccagcagccgcggtaatacgtaggtggcgagcgttatccggaattattgggcgtaaagagggagcaggcggcggcagaggtctgtggtgaaagactgaagcttaacttcagtaagccatagaaaccgggctgctagagtgcaggagaggatcgtggaattccatgtgtagcggtgaaatgcgtagatatatggaggaacaccagtggcgaaggcgacggtctggcctgtaactgacgctcattcccgaaagcgtggggagcaaataggattagataccctagtagtccacgccgtaaacgatgagtactaagtgttgggagtcaaatttcagtgctgcagttaacgcaataagtactccgcctgagtagtacgttcgcaagaatgaaactcaaaggaattgacgggggcccgcacaagcggtggagcatgtggtttaattcgaagcaacgcgaagaaccttaccaggtcttgacatccggataaagacctcagagatgaggggatagatatatccgagacaggtggtgcatggttgtcgtcagctcgtgtcgtgagatgttgggttaagtcccgcaacgagcgcaacccttgtcgctagttaccatcattaagttggggactctagcgagactgccagtgacaagctggaggaaggcggggatgacgtcaaatcatcatgccccttatgacctgggctacacacgtgctacaatggatggagcagagggaagcgaagccgcgaggtgaagcaaaacccataaaaccattctcagttcggattgtagtctgcaactcgactacatgaagttggaatcgctagtaatcgcgaatcagcatgtcgcggtgaatacgttctcgggccttgtacacaccgcccgtcacaccatgagagttgataacacccgaagccggtggcctaaccgc

SEQ ID NO: 129 - DNA, 1066 bp, Artificial Sequence
  STR00062 Collinsella_aerofaciens_strain_JCM_10188_16S_ribosomal_RNA
gcagcagtgaggaatattggtcaatggacgcaagtctgaaccagccatgccgcgtgcaggaagacggctctatgagttgtaaactgcttttgtactagggtaaacgctcctacgtgtaggagcctgaaagtatagtacgaataaggatcggctaactccgtgccagcagccgcggtaatacggaggatccaagcgttatccggatttattgggtttaaagggtgcgtaggcggtttgataagttagaggtgaaataccggggctcaactccggaactgcctctaatactgttgaactagagagtagttgcggtaggcggaatgtatggtgtagcggtgaaatgcttagagatcatacagaacaccgattgcgaaggcagcttaccaaactatatctgacgttgaggcacgaaagcgtggggagcaaacaggattagataccctggtagtccacgcagtaaacgatgataactcgttgtcggcgatacacagtcggtgactaagcgaaagcgataagttatccacctggggagtacgttcgcaagaatgaaactcaaaggaattgacgggggcccgcacaagcggaggaacatgtggtttaattcgatgatacgcgaggaaccttacccgggcttgaaagttagtgacgattctggaaacaggatttcccttcggggcacgaaactaggtgctgcatggttgtcgtcagctcgtgccgtgaggtgtcgggttaagtcccataacgagcgcaacccctaccgttagttgccatcaggtcaagctgggcactctggcgggactgccggtgtaagccgagaggaaggtggggatgacgtcaaatcagcacggcccttacgtccggggctacacacgtgttacaatggtaggtacagagggccgctaccccgcgaggggatgccaatctcgaaagcctatctcagttcggatcggaggctgaaacccgcctccgtgaagttggattcgctagtaatcgcgcatcagccatggcgcggtgaatacgttcccgggccttgtacacaccgcccgtcaagccatggaagctgggg

SEQ ID NO: 130 - DNA, 1302 bp, Artificial Sequence
  STR00003 Collinsella_aerofaciens_strain_JCM_10188_16S_ribosomal_RNA
  misc_feature (1265)..(1271): n is a, c, g, or t
gtatccaacctgccgatgactcggggatagcctttcgaaagaaagattaatacccgatggcataattcttccgcatggtagaattattaaagaatttcggtcatcgatggggatgcgttccattaggttgttggcggggtaacggcccaccaagccttcgatggataggggttctgagaggaaggtcccccacattggaactgagacacggtccaaactcctacgggaggcagcagtgaggaatattggtcaatggacgagagtctgaaccagccaagtagcgtgaaggatgactgccctatgggttgtaaacttcttttatacgggaataaagtgaggcacgtgtgcctttttgtatgtaccgtatgaataaggatcggctaactccgtgccagcagccgcggtaatacggaggatccgagcgttatccggatttattgggtttaaagggagcgtaggcggacgcttaagtcagttgtgaaagtttgcggctcaaccgtaaaattgcagttgatactgggtgtcttgagtacagtagaggcaggcggaattcgtggtgtagcggtgaaatgcttagatatcacgaagaactccgattgcgaaggcagcctgctggactgtaactgacgctgatgctcgaaagtgtgggtatcaaacaggattagataccctggtagtccacacagtaaacgatgaatactcgctgtttgcgatatacagtaagcggccaagcgaaagcgttaagtattccacctggggagtacgccggcaacggtgaaactcaaaggaattgacgggggcccgcacaagcggaggaacatgtggtttaattcgatgatacgcgaggaaccttacccgggcttgaattgcaactgaatgatgtggagacatgtcagccgcaaggcagttgtgaaggtgctgcatggttgtcgtcagctcgtgccgtgaggtgtcggcttaagtgccataacgagcgcaacccttatcgatagttaccatcaggttatgctggggactctgtcgagactgccgtcgtaagatgtgaggaaggtggggatgacgtcaaatcagcacggcccttacgtccggggctacacacgtgttacaatggggggtacagaaggcagctacacggtgacgtgatgctaatccctaaagcctctctcagttcggattggagtctgcaacccgactccatgaagctggattcgctagtaatcgcgcatcagccacggcgcggtgaatacgttcccgggccttgtacnnnnnnnccgtcaagccatgaaagccgggggtacctga

SEQ ID NO: 131 - DNA, 1379 bp, Artificial Sequence
  STR00061 Collinsella_aerofaciens_strain_JCM_10188_16S_ribosomal_RNA
ggggcatcagtttggtttgcttgcaaaccaaagctggcgaccggcgcacgggtgagtaacacgtatccaacctgcctcatactcggggatagcctttcgaaagaaagattaatatccgatagcatatatttcccgcatgggttttatattaaagaaattcggtatgagatggggatgcgttccattagtttgttggcggggtaacggcccaccaagactacgatggataggggttctgagaggaaggtcccccacattggaactgagacacggtccaaactcctacgggaggcagcagtgaggaatattggtcaatggacgcgagtctgaaccagccaagtagcgtgaaggatgactgccctatgggttgtaaacttcttttatatgggaataaagtggtccacgtgtggatttttgtatgtaccatatgaataaggatcggctaactccgtgccagcagccgcggtaatacggaggatccgagcgttatccggatttattgggtttaaagggagcgtaggcggattgttaagtcagttgtgaaagtttgcggctcaaccgtaaaattgcagttgatactggcagtcttgagtgcagtagaggtgggcggaattcgtggtgtagcggtgaaatgcttagatatcacgaagaactccgattgcgaaggcagctcactggagtgtaactgacgctgatgctcgaaagtgtgggtatcaaacaggattagataccctggtagtccacacagtaaacgatgaatactcgctgtttgcgatatacagtaagcggccaagcgaaagcattaagtattccacctggggagtacgccggcaacggtgaaactcaaaggaattgacgggggcccgcacaagcggaggaacatgtggtttaattcgatgatacgcgaggaaccttacccgggcttaaattgcaaatgaattatggggaaacccatacgccgcaaggcatttgtgaaggtgctgcatggttgtcgtcagctcgtgccgtgaggtgtcggcttaagtgccataacgagcgcaacccttatcttcagttactaacaggtcatgctgaggactctggagagactgccgtcgtaagatgtgaggaaggtggggatgacgtcaaatcagcacggcccttacgtccggggctacacacgtgttacaatggggggtacagaaggccgctacctggtgacaggatgccaatcccaaaaacctctctcagttcggatcgaagtctgcaacccgacttcgtgaagctggattcgctagtaatcgcgcatcagccatggcgcggtgaatacgttcccgggccttgtacacaccgcccgtcaagccatgaaagccgggggtacctgaagtacgtaaccgcaa

SEQ ID NO: 132 - DNA, 1370 bp, Artificial Sequence
  STR00071 Collinsella_aerofaciens_strain_JCM_10188_16S_ribosomal_RNA
  misc_feature (371)..(371): n is a, c, g, or t
tcgaacgagagaattgctagcttgctaataattctctagtggcgcacgggtgagtaacacgtgagtaacctgcccccgagagcgggatagccctgggaaactgggattaataccgcatagtatcgaaagattaaagcagcaatgcgcttggggatgggctcgcggcctattagttagttggtgaggtaacggctcaccaaggcgatgacgggtagccggtctgagaggatgtccggccacactggaactgagacacggtccagacacctacgggtggcagcagtcgagaatcattcacaatgggggaaaccctgatggtgcgacgccgcgtgggggaatgaaggtcttcggattgtaaacccctgtcatgntgggagcaaattaaaaagatagtaccacaagaggaagagacggctaactctgtgccagcagccgcggtaatacagaggtctcaagcgttgttcggaatcactgggcgtaaagcgtgcgtaggctgtttcgtaagtcgtgtgtgaaaggcgcgggctcaacccgcggacggcacatgatactgcgagactagagtaatggagggggaaccggaattctcggtgtagcagtgaaatgcgtagatatcgagaggaacactcgtggcgaaggcgggttcctggacattaactgacgctgaggcacgaaggccaggggagcgaaagggattagatacccctgtagtcctggcagtaaacggtgcacgcttggtgtgcggggaatcgaccccctgcgtgccggagctaacgcgttaagcgtgccgcctggggagtacggtcgcaagattaaaactcaaagaaattgacggggacccgcacaagcggtggagtatgtggcttaattcgatgcaacgcgaagaaccttacctgggcttgacatgtaatgaacaacatgtgaaagcatgcgactcttcggaggcgttacacaggtgctgcatggccgtcgtcagctcgtgtcgtgagatgtttggttaagtccagcaacgagcgcaacccctgttgccagttaccagcacgtgaaggtggggactctggcgagactgcccagatcaactgggaggaaggtggggacgacgtcaggtcagtatggcccttatgcccagggctgcacacgtactacaatgcccagtacagagggggccgaagccgcgaggcggaggaaatcctgaaaactgggcccagttcggactgtaggctgcaacccgcctacacgaagccggaatcgctagtaatggcgcatcagctacggcgccgtgaatacgttcccgggtcttgtacacaccgcccgtcacatcatggaagccggtcgcacccgaagtatctgaagccaaccgcaaggaggca

SEQ ID NO: 133 - DNA, 1298 bp, Artificial Sequence
  STR00007 Collinsella_aerofaciens_strain_JCM_10188_16S_ribosomal_RNA
  misc_feature (610)..(610): n is a, c, g, or t
ccgataactccgggatagcctttcgaaagaaagattaataccggatggcatacgaatatcgcatgatatttttattaaagaatttcggttatcgatggggatgcgttccattagtttgttggcggggtaacggcccaccaagactacgatggataggggttctgagaggaaggtcccccacattggaactgagacacggtccaaactcctacgggaggcagcagtgaggaatattggtcaatgggcgagagcctgaaccagccaagtagcgtgaaggatgaaggctctatgggtcgtaaacttcttttatatgggaataaagttttccacgtgtggaattttgtatgtaccatatgaataaggatcggctaactccgtgccagcagccgcggtaatacggaggatccgagcgttatccggatttattgggtttaaagggagcgtaggtggattgttaagtcagttgtgaaagtttgcggctcaaccgtaaaattgcagttgaaactggcagtcttgagtacagtagaggtgggcggaattcgtggtgtagcggtgaaatgcttagatatcacgaagaactccgattgcgaaggcagctcactagactgtnactgacactgatgctcgaaagtgtgggtatcaaacaggattagataccctggtagtccacacagtaaacgatgaatactcgctgtttgcgatatacagtaagcggccaagcgaaagcattaagtattccacctggggagtacgccggcaacggtgaaactcaaaggaattgacgggggcccgcacaagcggaggaacatgtggtttaattcgatgatacgcgaggaaccttacccgggcttaaattgcaacagaatatattggaaacagtatagccgtaaggctgttgtgaaggtgctgcatggttgtcgtcagctcgtgccgtgaggtgtcggcttaagtgccataacgagcgcaacccttatctttagttactaacaggttatgctgaggactctagagagactgccgtcgtaagatgtgaggaaggtggggatgacgtcaaatcagcacggcccttacgtccggggctacacacgtgttacaatggggggtacagaaggcggctacctggtgacaggatgctaatcccaaaaacctctctcagttcggatcgaagtctgcaacccgacttcgtgaagctggattcgctagtaatcgcgcatcagccatggcgcggtgaatacgttcccgggccttgtacacaccgcccgtcaagccatgaaagccgggggtacctgaagtacgta

SEQ ID NO: 134 - DNA, 1367 bp, Artificial Sequence
  STR00073 Collinsella_aerofaciens_strain_JCM_10188_16S_ribosomal_RNA
tcgaacgagagaagagaagcttgcttttctgatctagtggcggacgggtgagtaacacgtgagcaatctgcctttcagagggggataccgattggaaacgatcgttaataccgcataatataattgaaccgcatgatttgattatcaaagatttatcgctgaaagatgagctcgcgtctgattagctagttggtaaggtaacggcttaccaaggcgacgatcagtagccggactgagaggttgatcggccacattgggactgagacacggcccagactcctacgggaggcagcagtggggaatattgcacaatggaggaaactctgatgcagcgatgccgcgtgagggaagaaggttttaggattgtaaacctctgtcttcagggacgaaaaaagacggtacctgaggaggaagctccggctaactacgtgccagcagccgcggtaatacgtagggagcgagcgttgtccggaattactgggtgtaaagggagcgtaggcgggatcgcaagtcagatgtgaaaactatgggcttaacccataaactgcatttgaaactgtggttcttgagtgaagtagaggtaagcggaattcctagtgtagcggtgaaatgcgtagatattaggaggaacatcagtggcgaaggcggcttactgggctttaactgacgctgaggctcgaaagcgtggggagcaaacaggattagataccctggtagtccacgccgtaaacgatgattactaggtgtggggggactgaccccttccgtgccgcagcaaacgcaataagtaatccacctggggagtacgaccgcaaggttgaaactcaaaggaattgacgggggcccgcacaagcagtggagtatgtggattaattcgaagcaacgcgaagaaccttaccaggtcttgacatcgtatgcatagctcagagatgagtgaaatctcttcggagacatatagacaggtggtgcatggttgtcgtcagctcgtgtcgtgagatgttgggttaagtcccgcaacgagcgcaacccttactgttagttgctacgcaagagcactctagcaggactgccgttgacaaaacggaggaaggtggggatgacgtcaaatcatcatgccccttatgacctgggcctcacacgtactacaatggctgtaaacagagggatgcaaagccgcgaggtagagcgaacccctaaaagcagtcttagttcggattgtaggctgcaacccgcctacatgaagtcggaattgctagtaatcgcagatcagcatgctgcggtgaatacgttcccgggccttgtacacaccgcccgtcacgccatgggagtcggtaacacccgaagcctgtagtctaaccgcaaggagg

SEQ ID NO: 135 - DNA, 1331 bp, Artificial Sequence
  STR00078 Collinsella_aerofaciens_strain_JCM_10188_16S_ribosomal_RNA
gacgggtgagtaacgcgtgggtaacctgcctcatacagggggataacagttggaaacgactgctaataccgcataagcgcacagggtcgcatgacctggtgtgaaaaactccggtggtatgagatggacccgcgtctgattagccagttggtggggtaacggcctaccaaagcgacgatcagtagccgacctgagagggtgaccggccacattgggactgagacacggcccaaactcctacgggaggcagcagtggggaatattgcacaatgggggaaaccctgatgcagcgacgccgcgtgagcgaagaagtatttcggtatgtaaagctctatcagcagggaagaagaaatgacggtacctgactaagaagcaccggctaaatacgtgccagcagccgcggtaatacgtatggtgcaagcgttatccggatttactgggtgtaaagggagcgcaggcggtacggcaagtctgatgtgaaagcccggggctcaaccccggtactgcattggaaactgtcggactagagtgtcggaggggtaagtggaattcctagtgtagcggtgaaatgcgtagatattaggaggaacaccagtggcgaaggcggcttactggacgattactgacgctgaggctcgaaagcgtggggagcaaacaggattagataccctggtagtccacgccgtaaacgatgaatactaggtgtcggggagcattgctcttcggtgccgcagcaaacgcaataagtattccacctggggagtacgttcgcaagaatgaaactcaaaggaattgacggggacccgcacaagcggtggagcatgtggtttaattcgaagcaacgcgaagaaccttaccaagtcttgacatcccgatgacagaacatgtaatgtgttttctcttcggagcatcggtgacaggtggtgcatggttgtcgtcagctcgtgtcgtgagatgttgggttaagtcccgcaacgagcgcaacccctattcttagtagccagcggttcggccgggcactctagggagactgccagggataacctggaggaaggtggggatgacgtcaaatcatcatgccccttatgacttgggctacacacgtgctacaatggcgtaaacaaagggaagcgagcctgcgagggggagcaaatctcaaaaataacgtctcagttcggactgcagtctgcaactcgactgcacgaagctggaatcgctagtaatcgcgaatcagaatgtcgcggtgaatacgttcccgggtcttgtacacaccgcccgtcacaccatgggagttggtaatgcccgaagtcagtgacccaaccgcaaggagg

SEQ ID NO: 136 - DNA, 1354 bp, Artificial Sequence
  STR00126 Collinsella_aerofaciens_strain_JCM_10188_16S_ribosomal_RNA
gggcagcatggtcttagcttgctaaggccgatggcgaccggcgcacgggtgagtaacacgtatccaacctgccgtctactcttggacagccttctgaaaggaagattaatacaagatggcatcatgagtccgcatgttcacatgattaaaggtattccggtagacgatggggatgcgttccattagatagtaggcggggtaacggcccacctagtcttcgatggataggggttctgagaggaaggtcccccacattggaactgagacacggtccaaactcctacgggaggcagcagtgaggaatattggtcaatgggcgagagcctgaaccagccaagtagcgtgaaggatgactgccctatgggttgtaaacttcttttataaaggaataaagtcgggtatggatacccgtttgcatgtactttatgaataaggatcggctaactccgtgccagcagccgcggtaatacggaggatccgagcgttatccggatttattgggtttaaagggagcgtagatggatgtttaagtcagttgtgaaagtttgcggctcaaccgtaaaattgcagttgatactggatatcttgagtgcagttgaggcaggcggaattcgtggtgtagcggtgaaatgcttagatatcacgaagaactccgattgcgaaggcagcctgctaagctgcaactgacattgaggctcgaaagtgtgggtatcaaacaggattagataccctggtagtccacacggtaaacgatgaatactcgctgtttgcgatatactgcaagcggccaagcgaaagcgttaagtattccacctggggagtacgccggcaacggtgaaactcaaaggaattgacgggggcccgcacaagcggaggaacatgtggtttaattcgatgatacgcgaggaaccttacccgggcttaaattgcagatgaattacggtgaaagccgtaagccgcaaggcatctgtgaaggtgctgcatggttgtcgtcagctcgtgccgtgaggtgtcggcttaagtgccataacgagcgcaacccttgttgtcagttactaacaggttccgctgaggactctgacaagactgccatcgtaagatgtgaggaaggtggggatgacgtcaaatcagcacggcccttacgtccggggctacacacgtgttacaatggggggtacagagggccgctaccacgcgagtggatgccaatccccaaaacctctctcagttcggactggagtctgcaacccgactccacgaagctggattcgctagtaatcgcgcatcagccacggcgcggtgaatacgttcccgggccttgtacacaccgcccgtcaagccatgggagccgggg

SEQ ID NO: 137 - DNA, 1379 bp, Artificial Sequence
  STR00018 Collinsella_aerofaciens_strain_JCM_10188_16S_ribosomal_RNA
tcgaggggcagcatgaacttagcttgctaagtttgatggcgaccggcgcacgggtgagtaacacgtatccaacctgccgatgactcggggatagcctttcgaaagaaagattaatacccgatggcatagttcttccgcatggtggaactattaaagaatttcggtcatcgatggggatgcgttccattaggttgttggcggggtaacggcccaccaagccttcgatggataggggttctgagaggaaggtcccccacattggaactgagacacggtccaaactcctacgggaggcagcagtgaggaatattggtcaatggacgagagtctgaaccagccaagtagcgtgaaggatgactgccctatgggttgtaaacttcttttatacgggaataaagtgaggcacgtgtgcctttttgtatgtaccgtatgaataaggatcggctaactccgtgccagcagccgcggtaatacggaggatccgagcgttatccggatttattgggtttaaagggagcgtaggcggacgcttaagtcagttgtgaaagtttgcggctcaaccgtaaaattgcagttgatactgggtgtcttgagtacagtagaggcaggcggaattcgtggtgtagcggtgaaatgcttagatatcacgaagaactccgattgcgaaggcagcttgctggactgtaactgacgctgatgctcgaaagtgtgggtatcaaacaggattagataccctggtagtccacacagtaaacgatgaatactcgctgtttgcgatatacagtaagcggccaagcgaaagcgttaagtattccacctggggagtacgccggcaacggtgaaactcaaaggaattgacgggggcccgcacaagcggaggaacatgtggtttaattcgatgatacgcgaggaaccttacccgggcttgaattgcaactgaatgatgtggagacatgtcagccgcaaggcagttgtgaaggtgctgcatggttgtcgtcagctcgtgccgtgaggtgtcggcttaagtgccataacgagcgcaacccttatcgatagttaccatcaggttatgctggggactctgtcgagactgccgtcgtaagatgtgaggaaggtggggatgacgtcaaatcagcacggcccttacgtccggggctacacacgtgttacaatggggggtacagaaggcagctacacggcgacgtgatgctaatcccgaaagcctctctcagttcggattggagtctgcaacccgactccatgaagctggattcgctagtaatcgcgcatcagccacggcgcggtgaatacgttcccgggccttgtacacaccgcccgtcaagccatgaaagccgggggtacctgaagtgcgtaaccgc

SEQ ID NO: 138 - DNA, 1371 bp, Artificial Sequence
  STR00054 Collinsella_aerofaciens_strain_JCM_10188_16S_ribosomal_RNA
gcgagaggagttccttcgggaacaaatctagcggcggacgggtgagtaacacgtgggcaacctgccttgtagaggggaatagccttccgaaaggaagattaataccgcataatattacattttcgcatgaagaagtaattaaaggagcaatccgctacaagatgggcccgcggcgcattagctagttggtgaggtaacggctcaccaaggcgacgatgcgtagccgacctgagagggtgatcggccacattgggactgagacacggcccagactcctacgggaggcagcagtggggaatattgcacaatgggggaaaccctgatgcagcaacgccgcgtgagtgatgaaggtcttcggatcgtaaagctctgtcttcagggacgataatgacggtacctgaggaggaagccacggctaactacgtgccagcagccgcggtaatacgtaggtggcgagcgttgtccggatttactgggcgtaaagggagcgtaggcggatttttaagtgagatgtgaaatacccgggctcaacttgggtgctgcatttcaaactggaagtctagagtgcaggagaggagagtggaattcctagtgtagcggtgaaatgcgtagagattaggaagaacaccagtggcgaaggcgactctctggactgtaactgacgctgaggctcgaaagcgtggggagcaaacaggattagataccctggtagtccacgccgtaaacgatgaatactaggtgtaggggttgtcatgacctctgtgccgccgcaaacgcattaagtattccgcctggggagtacggtcgcaagattaaaactcaaaggaattgacgggggcccgcacaagcagcggagcatgtggtttaattcgaagcaacgcgaagaaccttacctagacttgacatctcctgcattactcttaatcgaggaagtcctttcggggacaggatgacaggtggtgcatggttgtcgtcagctcgtgtcgtgagatgttgggttaagtcccgcaacgagcgcaacccttattgttagttgctaccatttagttgagcactctagcgagactgcccgggttaaccgggaggaaggtggggatgacgtcaaatcatcatgccccttatgtctagggctacacacgtgctacaatggcaagtacaaagagatgcgataccgcgaggtggagctaaactataaaacttgtctcagttcggattgtaggctgaaactcgcctacatgaagctggagttgctagtaatcgcgaatcagaatgtcgcggtgaatacgttcccgggccttgtacacaccgcccgtcacaccatgagagttggcaatacccaaagttcgtgagctaacccgtaagggaggcagc

SEQ ID NO: 139 - DNA, 1330 bp, Artificial Sequence
  STR00038 Collinsella_aerofaciens_strain_JCM_10188_16S_ribosomal_RNA
  misc_feature (1026)..(1026): n is a, c, g, or t
ggcgaccggcgcacgggtgagtaacacgtatccaacctgccgataactcggggatagcctttcgaaagaaagattaatacccgatagtatagtatttccgcatggtttcactattaaagaatttcggttatcgatggggatgcgttccattagatagttggcggggtaacggcccaccaagtcaacgatggataggggttctgagaggaaggtcccccacattggaactgagacacggtccaaactcctacgggaggcagcagtgaggaatattggtcaatggacgagagtctgaaccagccaagtagcgtgaaggatgactgccctatgggttgtaaacttcttttatacgggaataaagtggagtatgcatactcctttgtatgtaccgtatgaataaggatcggctaactccgtgccagcagccgcggtaatacggaggatccgagcgttatccggatttattgggtttaaagggagcgtaggcgggtgcttaagtcagttgtgaaagtttgcggctcaaccgtaaaattgcagttgatactgggcgccttgagtgcagcataggtaggcggaattcgtggtgtagcggtgaaatgcttagatatcacgaagaactccgattgcgaaggcagcttactggactgtaactgacgctgatgctcgaaagtgtgggtatcaaacaggattagataccctggtagtccacacagtaaacgatgaatactcgctgttggcgatacacagtcagcggccaagcgaaagcattaagtattccacctggggagtacgccggcaacggtgaaactcaaaggaattgacgggggcccgcacaagcggaggaacatgtggtttaattcgatgatacgcgaggaaccttacccgggcttaaattgcagcggaatgtagtggaaacattacagccttcgggccgctgtgaaggtgctgcatggttgtcgtcagctcgtgccgtgaggtgtcggcttaagtgccataacgagcgcaacccttatctatagttactantcaggtcatgctgaggactctatggagactgccgtcgtaagatgtgaggaaggtggggatgacgtcaaatcagcacggcccttacgtccggggctacacacgtgttacaatggggggtacagaaggcagctacctggcgacaggatgctaatccccaaaacctctctcagttcggattggagtctgcaacccgactccatgaagctggattcgctagtaatcgcgcatcagccacggcgcggtgaatacgttcccgggccttgtacacaccgcccgtcaagccatgaaagccgggggtacctga

SEQ ID NO: 140 - DNA, 1365 bp, Artificial Sequence
  STR00030 Collinsella_aerofaciens_strain_JCM_10188_16S_ribosomal_RNA
  misc_feature (913)..(913): n is a, c, g, or t
ttcttcggattgaagtttttgtgactgagcggcggacgggtgagtaacgcgtgggtaacctgcctcatacagggggataacagttagaaatggctgctaataccgcataagcgcacaggaccgcatggtctggtgtgaaaaactccggtggtatgagatggacccgcgtctgattagctagttggaggggtaacggcccaccaaggcgacgatcagtagccggcctgagagggtgaacggccacattgggactgagacacggcccagactcctacgggaggcagcagtggggaatattgcacaatgggggaaaccctgatgcagcgacgccgcgtgaaggaagaagtatctcggtatgtaaacttctatcagcagggaagaaaatgacggtacctgactaagaagccccggctaactacgtgccagcagccgcggtaatacgtagggggcaagcgttatccggatttactgggtgtaaagggagcgtagacggaagagcaagtctgatgtgaaaggctggggcttaaccccaggactgcattggaaactgtttttctagagtgccggagaggtaagcggaattcctagtgtagcggtgaaatgcgtagatattaggaggaacaccagtggcgaaggcggcttactggacggtaactgacgttgaggctcgaaagcgtggggagcaaacaggattagataccctggtagtccacgccgtaaacgatgaatactaggtgtcgggtggcaaagccattcggtgccgcagcaaacgcaataagtattccacctggggagtacgttcgcaagaatgaaactcaaaggaattgacggggacccgcacaagcggtggagcatgtggtttaattcgaagcaacgcgaagaaccttaccaagtcttgacatccctctgaccnggcccgtaacggggccttcccttcggggcagaggagacaggtggtgcatggttgtcgtcagctcgtgtcgtgagatgttgggttaagtcccgcaacgagcgcaacccctatccttagtagccagcaggtgaagctgggcactctagggagactgccggggataacccggaggaaggcggggacgacgtcaaatcatcatgccccttatgatttgggctacacacgtgctacaatggcgtaaacaaagggaagcgagacagcgatgttgagcaaatcccaaaaataacgtcccagttcggactgcagtctgcaactcgactgcacgaagctggaatcgctagtaatcgcgaatcagaatgtcgcggtgaatacgttcccgggtcttgtacacaccgcccgtcacaccatgggagtcagtaacgcccgaagtcagtgacccaaccttataggag

SEQ ID NO: 141 - DNA, 1306 bp, Artificial Sequence
  STR00055 Collinsella_aerofaciens_strain_JCM_10188_16S_ribosomal_RNA
tgcctcacactgggggataacagttagaaatgactgctaataccgcataagcgcacagtaccgcatggtacggtgtgaaaaactccggtggtgtgagatggatccgcgtctgattagccagttgggggggtaacggcccaccaaagcgacgatcagtatccgacctgagagggtgaccggccacattgggactgagacacggcccaaactcctacgggaggcagcagtggggaatattgcacaatgggcgaaagcctgatgcagcgacgccgcgtgagtgaagaaatatttcggtatgtaaagctctatcagcagggaagaaaatgacggtacctgactaagaagccccggctaactacgtgccagcagccgcggtaatacgtagggggcaagcgttatccgggatttactgggtgtaaagggagcgtagacggcgaagcaagtctgaagtgaaaacccagggctcaaccctgggactgctttggaaactgttttgctagagtgtcggagaggtaagtggaattcctagtgtagcggtgaaatgcgtagatattaggaggaacaccagtggcgaaggcggcttactggacgataactgacgttgaggctcgaaagcgtggggagcaaacaggattagataccctggtagtccacgccgtaaacgatgaatgctaggtgttgggggggcaaagcccttcggtgccgtcgcaaacgcagtaagcattccacctggggagtacgttcgcaagaatgaaactcaaaggaattgacggggacccgcacaagcggtggagcatgtggtttaattcgaagcaacgcgaagaaccttaccaagtcttgacatcctcttgaccggcgtgtaacggcgccttcccttcggggcaagagagacaggtggtgcatggttgtcgtcagctcgtgtcgtgagatgttgggttaagtcccgcaacgagcgcaacccttatccttagtagccagcaggtagagctgggcactctagggagactgccagggataacctggaggaaggtggggatgacgtcaaatcatcatgccccttatgatttgggctacacacgtgctacaatggcgtaaacaaagggaagcaagacagtgatgtggagcaaatcccaaaaataacgtcccagttcggactgtagtctgcaacccgactacacgaagctggaatcgctagtaatcgcgaatcagaatgtcgcggtgaatacgttcccgggtcttgtacacaccgcccgtcacaccatgggagtcagcaacgcccgaagtcagtgacccaactcgcaagaga

SEQ ID NO: 142 - DNA, 1359 bp, Artificial Sequence
  STR00039 Collinsella_aerofaciens_strain_JCM_10188_16S_ribosomal_RNA
gcggatttcttcggattgaagcaattgtgactgagcggcggacgggtgagtaacgcgtgggtaacctgcctcatacagggggataacagttggaaacggctgctaataccgcataagcgcacagtaccgcatggtaccgtgtgaaaaactccggtggtatgagatggacccgcgtctgattagctagttggtggggtaacggcctaccaaggcgacgatcagtagccgacctgagagggtgaccggccacattgggactgagacacggcccaaactcctacgggaggcagcagtggggaatattgcacaatgggggaaaccctgatgcagcgacgccgcgtgagcgatgaagtatttcggtatgtaaagctctatcagcagggaagaaaatgacggtacctgactaagaagccccggctaactacgtgccagcagccgcggtaatacgtagggggcaagcgttatccggatttactgggtgtaaagggagcgtagacggcatggcaagccagatgtgaaagcccggggctcaaccccgggactgcatttggaactgtcaggctagagtgtcggagaggaaagcggaattcctagtgtagcggtgaaatgcgtagatattaggaggaacaccagtggcgaaggcggctttctggacgatgactgacgttgaggctcgaaagcgtggggagcaaacaggattagataccctggtagtccacgccgtaaacgatgaatactaggtgtcgggtggcaaagccattcggtgccgcagcaaacgcaataagtattccacctggggagtacgttcgcaagaatgaaactcaaaggaattgacggggacccgcacaagcggtggagcatgtggtttaattcgaagcaacgcgaagaaccttacctggtcttgacatcccctctgaccgctctttaatcggagctttcccttcgggacagaggagacaggtggtgcatggttgtcgtcagctcgtgtcgtgagatgttgggttaagtcccgcaacgagcgcaacccctatctttagtagccagcatttaaggtgggcactctagagagactgccagggataacctggaggaaggtggggatgacgtcaaatcatcatgccccttatgaccagggctacacacgtgctacaatggcgtaaacaaagggaagcgagcccgcgagggggagcaaatcccaaaaataacgtctcagttcggattgtagtctgcaactcgactacatgaagctggaatcgctagtaatcgcgaatcagaatgtcgcggtgaatacgttcccgggtcttgtacacaccgcccgtcacaccatgggagtcagtaacgcccgaagtcagtgaccca

SEQ ID NO: 143 - DNA, 1365 bp, Artificial Sequence
  STR00047 Collinsella_aerofaciens_strain_JCM_10188_16S_ribosomal_RNA
  misc_feature (941)..(948): n is a, c, g, or t
tcgaacggacggattggagcttgctccatgaagttagtggcggacgggtgagtaacgcgtgggtaacctgccctatgcagggggataacgtttggaaacgaacgctaataccgcataacctagttggttcgcatgaaccgactagcaaagattttatcggcataggatggacccgcgttggattagctagttggtgagataacagcccaccaaggcaacgatccatagccggcctgagagggtgaacggccacactgggactgagacacggcccagactcctacgggaggcagcagtggggaatattgcacaatgggcgcaagcctgatgcagcgacgccgcgtgaaggatgaaggtcttcggatcgtaaacttctatcagcagggaagaaaccatgacggtacctgactaagaagccccggctaactacgtgccagcagccgcggtaatacgtagggggcaagcgttatccggaattactgggtgtaaagggtgcgtaggcggcgatttaagtcagatgtgaaaactcagggctcaaccttgagactgcatctgaaactgagttgctagagtgcaggagaggaaagcggaattccgagtgtagcggtgaaatgcgtagagattcggaggaacaccagtagcgaaggcggctttctggactgtaactgacgctgaggcacgaaagcgtggggagcgaacaggattagataccctggtagtccacgccgtaaacgatgaatactaggtgtcggggcttacgggtctcggtgccgcagctaacgcattaagtattccacctgggaagtacgaccgcaaggttgaaactcaaaggaattgacggggacccgcacaagcggtggagcatgtggtttaattcgaagcaacgcgaagaaccttacctaaacttgacatcccttttgaccggacggtaatgccttctnnnnnnnntcactagcttgctagtgcaaaagtgacaggtggtgcatggttgtcgtcagctcgtgtcgtgagatgttgggttaagtcccgcaacgagcgcaacccctatctttagtagccatcattcagttgggcactctagagagactgccagggataacctggaggaaggtggggatgacgtcaaatcatcatgccccttatgtttagggctacacacgtgctacaatgggtgctacaaagggaagcaaatccgcgaggccgagcaaatctcaaaaaagcactcccagttcggattgtagtctgcaactcgactacatgaagttggaatcgctagtaatcgcgaatcagaatgtcgcggtgaatacgttcccgggtcttgtacacaccgcccgtcacaccatgggagttgggggggcccaacgc

SEQ ID NO: 144 - DNA, 1289 bp, Artificial Sequence
  STR00026 Collinsella_aerofaciens_strain_JCM_10188_16S_ribosomal_RNA
  misc_feature (838)..(838): n is a, c, g, or t
  misc_feature (887)..(887): n is a, c, g, or t
  misc_feature (1257)..(1257): n is a, c, g, or t
aggaacctgcctcaaagagggggacaacagttggaaacgactgctaataccgcataagcccacgacccggcatcgggtagagggaaaaggagcaatccgctttgagatggcctcgcgtccgattagctagttggtgaggtaatggcccaccaaggcgacgatcggtagccggactgagaggttgaacggccacattgggactgagacacggcccagactcctacgggaggcagcagtggggaatattgcacaatgggggaaaccctgatgcagcgacgccgcgtggaggaagaaggtcttcggattgtaaactcctgttgttgaggaagataatgacggtactcaacaaggaagtgacggctaactacgtgccagcagccgcggtaaaacgtaggtcacaagcgttgtccggaattactgggtgtaaagggagcgcaggcgggaagacaagttggaagtgaaatccatgggctcaacccatgaactgctttcaaaactgtttttcttgagtagtgcagaggtaggcggaattcccggtgtagcggtggaatgcgtagatatcgggaggaacaccagtggcgaaggcggcctactgggcaccaactgacgctgaggctcgaaagtgtgggtagcaaacaggattagataccctggtagtccacactgtaaacgatgattactaggtgttggaggattgaccccttcagtgccgcagttaacacaataagtaatccacctggggagtacgaccgcaaggttgaaactcaaaggaattgacgggggcccgcacaagcagtggagtatgtggtttaattcgacgcaacgcgaagaaccttanccaagtcttgacatcctgcgacggtgctggaaacagtactttccttcgnggacgcagagacaggtggtgcatggttgtcgtcagctcgtgtcgtgagatgttgggttaagtcccgcaacgagcgcaacccttatggtcagttactacgcaagaggactctggccagactgccgttgacaaaacggaggaaggtggggatgacgtcaaatcatcatgccctttatgacttgggctacacacgtactacaatggcgttaaacaaagagaagcaagaccgcgaggtggagcaaaactcagaaacaacgtcccagttcggactgcaggctgcaactcgcctgcacgaagtcggaattgctagtaatcgcagatcagcatgctgcggtgaatacgttcccgggccttgtacacaccgcccgtcncaccatgagagccggggggacccgaagtcggt

SEQ ID NO: 145 - DNA, 1212 bp, Artificial Sequence
  STR00136 Collinsella_aerofaciens_strain_JCM_10188_16S_ribosomal_RNA
  misc_feature (53)..(53): n is a, c, g, or t
  misc_feature (1172)..(1172): n is a, c, g, or t
aagaaagattaatacccgatagtatagtatttccgcatggtttcgctattaangaatttcggttatcgatggggatgcgttccattagatagttggcggggtaacggcccaccaagtcaacgatggataggggttctgagaggaaggtcccccacattggaactgagacacggtccaaactcctacgggaggcagcagtgaggaatattggtcaatggacgagagtctgaaccagccaagtagcgtgaaggatgactgccctatgggttgtaaacttcttttatacgggaataaagtggagtatgcatactcctttgtatgtaccgtatgaataaggatcggctaactccgtgccagcagccgcggtaatacggaggatccgagcgttatccggatttattgggtttaaagggagcgtaggcgggtgcttaagtcagttgtgaaagtttgcggctcaaccgtaaaattgcagttgatactgggcgccttgagtgcagcataggtaggcggaattcgtggtgtagcggtgaaatgcttagatatcacgaagaactccgattgcgaaggcagcttactggactgtaactgacgctgatgctcgaaagtgtgggtatcaaacaggattagataccctggtagtccacacagtaaacgatgaatactcgctgttggcgatacacagtcagcggccaagcgaaagcattaagtattccacctggggagtacgccggcaacggtgaaactcaaaggaattgacgggggcccgcacaagcggaggaacatgtggtttaattcgatgatacgcgaggaaccttacccgggcttaaattgcagtggaatgtagtggaaacattacagccttcgggccgctgtgaaggtgctgcatggttgtcgtcagctcgtgccgtgaggtgtcggcttaagtgccataacgagcgcaacccttatctatagttactatcaggtcatgctgaggactctatggagactgccgtcgtaagatgtgaggaaggtggggatgacgtcaaatcagcacggcccttacgtccggggctacacacgtgttccaatggggggtacagaaggcagctacctggcgacaggatgctaatccctaaaacctctctcagttcggattggagtctgcaacccgactccatgaagctggattngctagtaatcgcgcatcagccacggcgcggtgaatacgtt

SEQ ID NO: 146 - DNA, 1334 bp, Artificial Sequence
  STR00020 Collinsella_aerofaciens_strain_JCM_10188_16S_ribosomal_RNA
agcacttgtgctcgagtggcgaacgggtgagtaatacataagtaacctgccctagacagggggataactattggaaacgatagctaagaccgcataggtacggacactgcatggtgaccgtattaaaagtgcctcaaagcactggtagaggatggacttatggcgcattagctggttggcggggtaacggcccaccaaggcgacgatgcgtagccgacctgagagggtgaccggccacactgggactgagacacggcccagactcctacgggaggcagcagtagggaattttcggcaatgggggaaaccctgaccgagcaacgccgcgtgaaggaagaaggttttcggattgtaaacttctgttataaaggaagaacggcggctacaggaaatggtagccgagtgacggtactttattagaaagccacggctaactacgtgccagcagccgcggtaatacgtaggtggcaagcgttatccggaattattgggcgtaaagagggagcaggcggcagcaagggtctgtggtgaaagcctgaagcttaacttcagtaagccatagaaaccaggcagctagagtgcaggagaggatcgtggaattccatgtgtagcggtgaaatgcgtagatatatggaggaacaccagtggcgaaggcgacgatctggcctgcaactgacgctcagtcccgaaagcgtggggagcaaataggattagataccctagtagtccacgccgtaaacgatgagtactaagtgttggatgtcaaagttcagtgctgcagttaacgcaataagtactccgcctgagtagtacgttcgcaagaatgaaactcaaaggaattgacgggggcccgcacaagcggtggagcatgtggtttaattcgaagcaacgcgaagaaccttaccaggtcttgacatactcataaaggctccagagatggagagatagctatatgagatacaggtggtgcatggttgtcgtcagctcgtgtcgtgagatgttgggttaagtcccgcaacgagcgcaacccttatcgttagttaccatcattaagttggggtctctagcgagactgccagtgacaagctggaggaaggcggggatgacgtcaaatcatcatgccccttatgacctgggctacacacgtgttacaatggatggtgcagagggaagggaagccgcgaggtgaagcaaaacccataaaaccattctcagttcggattgtagtctgcaactcgactacatgaagttggaatcggtagtaatcgcgaatcagcatgtcgcggtgaatacgttctcgggccttgtacacaccgcccgtcacaccacgagag

SEQ ID NO: 147 - DNA, 1324 bp, Artificial Sequence
  STR00002 Collinsella_aerofaciens_strain_JCM_10188_16S_ribosomal_RNA
gacgggtgagtaacgcgtgggtaacctgcctcatacagggggataacagttagaaatgactgctaataccgcataagaccacagagccgcatggctcagagggaaaaactccggtggtatgagatggacccgcgtctgattaggtagttggtggggtaacggcctaccaagccgacgatcagtagccgacctgagagggtgaccggccacattgggactgagacacggcccaaactcctacgggaggcagcagtggggaatattgcacaatgggggaaaccctgatgcagcgacgccgcgtgagcgaagaagtatttcggtatgtaaagctctatcagcagggaagaaaatgacggtacctgactaagaagcaccggctaaatacgtgccagcagccgcggtaatacgtatggtgcaagcgttatccgggatttactgggtgtaaagggagcgtagacggctgtgtaagtctgaagtgaaagcccggggctcaaccccgggactgctttggaaactatgcagctagagtgtcggagaggtaagtggaattcccagtgtagcggtgaaatgcgtagatattgggaggaacaccagtggcgaaggcggcttactggacgatgactgacgttgaggctcgaaagcgtggggagcaaacaggattagataccctggtagtccacgccgtaaacgatgactactaggtgtcggggagcaaagctcttcggtgccgcagcaaacgcaataagtagtccacctggggagtacgttcgcaagaatgaaactcaaaggaattgacggggacccgcacaagcggtggagcatgtggtttaattcgaagcaacgcgaagaaccttacctgctcttgacatcccggtgaccggcatgtaatgatgccttttcttcggaacaccgggtgacaggtggtgcatggttgtcgtcagctcgtgtcgtgagatgttgggttaagtcccgcaacgagcgcaacccttatcttcagtagccagcaattcggatgggcactctggagagactgccagggataacctggaggaaggtggggatgacgtcaaatcatcatgccccttatgagcagggctacacacgtgctacaatggcgtaaacaaaggggagcaagcctgcgagggtaagcaaatctcaaaaataacgtctcagttcggattgtagtctgcaactcgactacatgaagctggaatcgctagtaatcgcgaatcagcatgtcgcggtgaatacgttcccgggtcttgtacacaccgcccgtcacaccatgggagttggtaacgcccgaagtcagtgacccaaccgt

SEQ ID NO: 148 - DNA, 1366 bp, Artificial Sequence
  STR00013 Collinsella_aerofaciens_strain_JCM_10188_16S_ribosomal_RNA
cgaagtttcgaggaagcttgcttccaaagagacttagtggcgaacgggtgagtaacacgtaggtaacctgcccatgtgtccgggataactgctggaaacggtagctaaaaccggataggtatacagagcgcatgctcagtatattaaagcgcccatcaaggcgtgaacatggatggacctgcggcgcattagctagttggtgaggtaacggcccaccaaggcgatgatgcgtagccggcctgagagggtaaacggccacattgggactgagacacggcccaaactcctacgggaggcagcagtagggaattttcgtcaatgggggaaaccctgaacgagcaatgccgcgtgagtgaagaaggtcttcggatcgtaaagctctgttgtaagtgaagaacggctcatagaggaaatgctatgggagtgacggtagcttaccagaaagccacggctaactacgtgccagcagccgcggtaatacgtaggtggcaagcgttatccggaatcattgggcgtaaagggtgcgtaggtggcgtactaagtctgtagtaaaaggcaatggctcaaccattgtaagctatggaaactggtatgctggagtgcagaagagggcgatggaattccatgtgtagcggtaaaatgcgtagatatatggaggaacaccagtggcgaaggcggtcgcctggtctgtaactgacactgaggcacgaaagcgtggggagcaaataggattagataccctagtagtccacgccgtaaacgatgagaactaagtgttggaggaattcagtgctgcagttaacgcaataagttctccgcctggggagtatgcacgcaagtgtgaaactcaaaggaattgacgggggcccgcacaagcggtggagtatgtggtttaattcgaagcaacgcgaagaaccttaccaggccttgacatggaaacaaataccctagagatagggggataattatggatcacacaggtggtgcatggttgtcgtcagctcgtgtcgtgagatgttgggttaagtcccgcaacgagcgcaacccttgtcgcatgttaccagcatcaagttggggactcatgcgagactgccggtgacaaaccggaggaaggtggggatgacgtcaaatcatcatgccccttatggcctgggctacacacgtactacaatggcggccacaaagagcagcgacacagtgatgtgaagcgaatctcataaaggtcgtctcagttcggattgaagtctgcaactcgacttcatgaagtcggaatcgctagtaatcgcagatcagcatgctgcggtgaatacgttctcgggccttgtacacaccgcccgtcaaaccatgggagtcagtaatacccgaa

SEQ ID NO: 149 - DNA, 1352 bp, Artificial Sequence
  STR00021 Collinsella_aerofaciens_strain_JCM_10188_16S_ribosomal_RNA
  misc_feature (887)..(887): n is a, c, g, or t
  misc_feature (1249)..(1249): n is a, c, g, or t
tgaaacttcggtagaaggatatggtggaaagcggcggacgggtgagtaacgcgtaggcaacctgccccttacagagggatagccattggaaacgatgattaaaacctcataacgcatcccccccacatggaggggaagccaaagattcatcggtaagggatgggcctgcgtctgattagcttgttggcggggtaacggcccaccaaggcgacgatcagtagccgacctgagagggtgatcggccacattggaactgagacacggtccaaactcctacgggaggcagcagtggggaatattgcacaatgggcgaaagcctgatgcagcaacgccgcgtgagggatgaaggccttcgggtcgtaaacctctgtccttggggaagaaacaaatgacggtacccatggaggaagccccggctaactacgtgccagcagccgcggtaatacgtagggggcgagcgttatccggaattattgggcgtaaagagtgcgtaggtggttacctaagcgcagggtctaaggcaatggctcaaccattgttcgccctgcgaactgggctacttgagtgcaggagaggaaagcggaattcctagtgtagcggtgaaatgcgtagatattaggaggaacaccagtggcgaaggcggctttctggactgttactgacactgaggcacgaaagcgtggggagcaaacaggattagataccctggtagtccacgccgtaaacgatgagcactaggtgtcggggccgcaaggcttcggtgccgcagttaacgcattaagtgctccgcctggggagtacgcacgcaagtgtgaaactcaaaggaattgacggggacccgcacaagcagcggagcatgtggtttaattcgaagcaacgcgaagaanccttaccaggacttgacatcccactgacagatccctaaccggatccttcttcggacagtggagacaggtggtgcatggttgtcgtcagctcgtgtcgtgagatgttgggttaagtcccgcaacgagcgcaacccttgccattagttgccatcattcagttgggcactctaatgggactgccggggacaactcggaggaaggtggggatgacgtcaaatcatcatgccccttatgttctgggctacacacgtgctacaatggccggtacagcaagaagcaaaaccgcgaggtggagcaaatctcaaaaaccggtcccagttcggactgcaggctgaaacccgcctgcacgaagccggagttgntagtaatcgtggatcagaatgccacggtgaatgcgttcccgggtcttgtacacaccgcccgtcacaccatggaagttgggggtgcccgaagccggcagggaaa

SEQ ID NO: 150 - DNA, 1359 bp, Artificial Sequence
  STR00034 Collinsella_aerofaciens_strain_JCM_10188_16S_ribosomal_RNA
  misc_feature (459)..(459): n is a, c, g, or t
tttcggatggaatttgattgactgagtggcggacgggtgagtaacgcgtggataacctgcctcacactgggggataacagttagaaatgactgctaataccgcataagcgcacagtaccgcatggtacggtgtgaaaaactccggtggtgtgagatggatccgcgtctgattagccagttggcggggtaacggcccaccaaagcgacgatcagtagccgacctgagagggtgaccggccacattgggactgagacacggcccaaactcctacgggaggcagcagtggggaatattgcacaatgggcgaaagcctgatgcagcgacgccgcgtgagtgaagaagtatttcggtatgtaaagctctatcagcagggaagaaaatgacggtacctgactaagaagccccggctaactacgtgccagcagccgcggtaatacgtagggggcaagcgttatccnggatttactgggtgtaaagggagcgtagacggcgaagcaagtctgaagtgaaaacccagggctcaaccctgggactgctttggaaactgttttgctagagtgtcggagaggtaagtggaattcctagtgtagcggtgaaatgcgtagatattaggaggaacaccagtggcgaaggcggcttactggacgataactgacgttgaggctcgaaagcgtggggagcaaacaggattagataccctggtagtccacgccgtaaacgatgaatgctaggtgttggggggcaaagcccttcggtgccgtcgcaaacgcagtaagcattccacctggggagtacgttcgcaagaatgaaactcaaaggaattgacggggacccgcacaagcggtggagcatgtggtttaattcgaagcaacgcgaagaaccttaccaagtcttgacatccttttgaccggcgtgtaacggcgccttcccttcggggcaagagagacaggtggtgcatggttgtcgtcagctcgtgtcgtgagatgttgggttaagtcccgcaacgagcgcaacccttatccttagtagccagcaggtagagctgggcactctagggagactgccagggataacctggaggaaggtggggatgacgtcaaatcatcatgccccttatgatttgggctacacacgtgctacaatggcgtaaacaaagggaagcaagacagtgatgtggagcaaatcccaaaaataacgtcccagttcggactgtagtctgcaacccgactacacgaagctggaatcgctagtaatcgcgaatcagaatgtcgcggtgaatacgttcccgggtcttgtacacaccgcccgtcacaccatgggagtcagcaacgcccgaagtcagtgacccaactcgcaag

SEQ ID NO: 151 - DNA, 1347 bp, Artificial Sequence
  STR00134 Collinsella_aerofaciens_strain_JCM_10188_16S_ribosomal_RNA
acggagatttcggttgaagttttctattgactgagtggcggacgggtgagtaacgcgtgggtaacctgccctatacagggggataacagttagaaatgactgctaataccgcataagcgcacagcttcgcatgaagcggtgtgaaaaactgaggtggtataggatggacccgcgttggattagctagttggtgaggtaacggcccaccaaggcgacgatccatagccggcctgagagggtgaacggccacattgggactgagacacggcccaaactcctacgggaggcagcagtggggaatattgcacaatgggggaaaccctgatgcagcgacgccgcgtgaaggaagaagtatctcggtatgtaaacttctatcagcagggaagaaagtgacggtacctgactaagaagccccggctaattacgtgccagcagccgcggtaatacgtaaggggcaagcgttatccggatttactgggtgtaaagggagcgtagacggtttggcaagtctgatgtgaaaggcatgggctcaacctgtggactgcattggaaactgtcaggcttgagtgccggagaggcaagcggaattcctagtgtagcggtgaaatgcgtagatattaggaggaacaccagtggcgaaggcggcctgctggacggtaactgacgttgaggctcgaaagcgtggggagcaaacaggattagataccctggtagtccacgctgtaaacgatgaatactaggtgtcgggtggcaaagccattcggtgccgcagcaaacgcaataagtattccacctggggagtacgttcgcaagaatgaaactcaaaggaattgacggggacccgcacaagcggtggagcatgtggtttaattcgaagcaacgcgaagaaccttaccaaatcttgacatccctctgaccgggaagtaatgttcccttttcttcggaacagaggagacaggtggtgcatggttgtcgtcagctcgtgtcgtgagatgttgggttaagtcccgcaacgagcgcaacccttattcttagtagccagcaggtaaagctgggcactctagggagactgccagggataacctggaggaaggtggggatgacgtcaaatcatcatgccccttatgatttgggctacacacgtgctacaatggcgtaaacaaagggaagcgaaggggtgacctggagcaaatctcaaaaataacgtctcagttcggattgtagtctgcaactcgactacatgaagctggaatcgctagtaatcgcgaatcagaatgtcgcggtgaatacgttcccgggtcttgtacacaccgcccgtcacaccatgggagtcagtaacgcccgaag

SEQ ID NO: 152 - DNA, 1348 bp, Artificial Sequence
  STR00040 Collinsella_aerofaciens_strain_JCM_10188_16S_ribosomal_RNA
  misc_feature (28)..(28): n is a, c, g, or t
tcttcggaatgaatttgattaagtttangtggcggacgggtgagtaacgcgtgagtaacctgcctctaagaggggaataacattctgaaaagaatgctaataccgcataatatatatttatcgcatggtagatatatcaaagatttatcgcttagagatggactcgcgtccgattagttagttggtgaggtaacggctcaccaagaccgcgatcggtagccggactgagaggttgaacggccacattgggactgagacacggcccagactcctacgggaggcagcagtgggggatattgcgcaatgggggaaaccctgacgcagcaacgccgcgtgaaggatgaaggtcttcggattgtaaacttcttttattaaggacgaagaaagtgacggtacttaatgaataagctccggctaactacgtgccagcagccgcggtaatacgtagggagcaagcgttgtccggatttactgggtgtaaagggtgcgtaggcggctttgcaagtcagatgtgaaatctatgggctcaacccatagcctgcatttgaaactgcagagcttgagtgaagtagaggcaggcggaattccccgtgtagcggtgaaatgcgtagagatggggaggaacaccagtggcgaaggcggcctgctgggctttaactgacgctgaggcacgaaagcgtgggtagcaaacaggattagataccctggtagtccacgctgtaaacgatgattactaggtgtggggggtctgaccccttccgtgccggagttaacacaataagtaatccacctggggagtacggccgcaaggttgaaactcaaaggaattgacgggggcccgcacaagcagtggagtatgtggtttaattcgaagcaacgcgaagaaccttaccaggtcttgacatcctactaacgagatagagatatgttaggtgcccttcggggaaagtagagacaggtggtgcatggttgtcgtcagctcgtgtcgtgagatgttgggttaagtcccgcaacgagcgcaacccttgctattagttgctacgcaagagcactctaataggactgccgttgacaaaacggaggaaggtggggacgacgtcaaatcatcatgccccttatgacctgggctacacacgtactacaatggatattaacagagggaagcaatacagtgatgtggagcaaacccctaaaaatgttctcagttcagattgcaggctgcaacccgcctgtatgaagatggaattgctagtaatcgcagatcagcatgctgcggtgaatacgttcccgggccttgtacacaccgcccgtcacaccatgggagccggtaatacccgaagtcagtagt

SEQ ID NO: 153 - DNA, 1257 bp, Artificial Sequence
  STR00057 Collinsella_aerofaciens_strain_JCM_10188_16S_ribosomal_RNA
  misc_feature (582)..(582): n is a, c, g, or t
cgagggggataactattggaaacgatagctaagaccgcataggcataattctcgcatgagagttatgttaaatatcctatgggatagcgagaggatggacttatggcgcattagctagttggtgagggtaacggcccaccaaggcgacgatgcgtagccgacctgagagggtggacggccacactgggactgagacacggcccagactcctacgggaggcagcagtagggaattttcggcaatgggcgaaagcctgaccgagcaacgccgcgtgagggaggaagtatttcggtatgtaaacctctgttataaaggaagaacggtgcatgtagggaatgacatgcaagtgacggtactttatgagaaagccacggctaactacgtgccagcagccgcggtaatacgtaggtggcgagcgttatccggaatcattgggcgtaaagagggagcaggcggcaactagggtctgcggtaaaagaccgaagctaaacttcggtaagccgtggaaaccgaggagctagagtgcagtagaggatcgtggaattccatgtgtagcggtgaaatgcgtagatatatggaggnaacaccagtggcgaaggcgacgatctgggctgcaactgacgctcagtcccgaaagcgtggggagcaaataggattagataccctagtagtccacgccgtaaacgatgagtactaagtgttgggggtcagacctcagtgctgcagttaacgcaataagtactccgcctgagtagtacgttcgcaagaatgaaactcaaaggaattgacgggggcccgcacaagcggtggagcatgtggtttaattcgaagcaacgcgaagaaccttaccaggtcttgacatacccttaaaggctctagagatagagagatagctataggggatacaggtggtgcatggttgtcgtcagctcgtgtcgtgagatgttgggttaagtcccgcaacgagcgcaacccctgttgccagttgccagcattaagttggggactctggcgagactgcctctgcaaggaggaggaaggcggggatgacgtcaaatcatcatgccccttatgacctgggctacacacgtgctacaatggacggatcagagggaagcgaagccgcgaggtggagcgaaacccagaaacccgttctcagttcggactgcagtctgcaactcgactgcacgaagttggaatcgctagtaatcgcgaatcagcatgtcgcggtgaatacgttctcgggccttgtacaca

SEQ ID NO: 154 - DNA, 1320 bp, Artificial Sequence
  STR00024 Collinsella_aerofaciens_strain_JCM_10188_16S_ribosomal_RNA
  misc_feature (1294)..(1294): n is a, c, g, or t
  misc_feature (1298)..(1298): n is a, c, g, or t
gagttacctagtggcggacgggtgagtaacgcgtgaggaacctgccttggagaggggaataacactccgaaaggagtgctaataccgcatgatgcagttgggtcgcatggctctgactgccaaagatttatcgctctgagatggcctcgcgtctgattagctagtaggcggggtaacggcccacctaggcgacgatcagtagccggactgagaggttgaccggccacattgggactgagacacggcccagactcctacgggaggcagcagtggggaatattgggcaatgggcgcaagcctgacccagcaacgccgcgtgaaggaagaaggctttcgggttgtaaacttcttttgtcggggacgaaacaaatgacggtacccgacgaataagccacggctaactacgtgccagcagccgcggtaatacgtaggtggcaagcgttatccggatttactgggtgtaaagggcgtgtaggcgggattgcaagtcagatgtgaaaactgggggctcaacctccagcctgcatttgaaactgtagttcttgagtgctggagaggcaatcggaattccgtgtgtagcggtgaaatgcgtagatatacggaggaacaccagtggcgaaggcggattgctggacagtaactgacgctgaggcgcgaaagcgtggggagcaaacaggattagataccctggtagtccacgccgtaaacgatggatactaggtgtggggggtctgaccccctccgtgccgcagttaacacaataagtatcccacctggggagtacgatcgcaaggttgaaactcaaaggaattgacgggggcccgcacaagcggtggagtatgtggtttaattcgaagcaacgcgaagaaccttaccagggcttgacatcccactaacgaagcagagatgcattaggtgcccttcggggaaagtggagacaggtggtgcatggttgtcgtcagctcgtgtcgtgagatgttgggttaagtcccgcaacgagcgcaacccttattgttagttgctacgcaagagcactctagcgagactgccgttgacaaaacggaggaaggtggggacgacgtcaaatcatcatgccccttatgtcctgggccacacacgtactacaatggtggttaacagagggaggcaatcccgcgaggtggagcaaatccctaaaagccatcccagtttggattgcaggctgaaacccgcctgtatgaagttggaatcgctagtaatcgcggatcagcatgccgcggtgaatacgttcccgggccttgtacacaccgcccgncacnccatgagagtcgggaacacccg

SEQ ID NO: 155 - DNA, 1184 bp, Artificial Sequence
  STR00031 Collinsella_aerofaciens_strain_JCM_10188_16S_ribosomal_RNA
gatgcgttccattagtttgttggcggggtaacggcccaccaagacatcgatggataggggttctgagaggaaggtcccccacattggaactgagacacggtccaaactcctacgggaggcagcagtgaggaatattggtcaatggacgagagtctgaaccagccaagtagcgtgaaggatgactgccctatgggttgtaaacttcttttatatgggaataaagtgcagtatgtatactgttttgtatgtaccatacgaataaggatcggctaactccgtgccagcagccgcggtaatacggaggatccgagcgttatccggatttattgggtttaaagggagcgtaggcggattattaagtcagttgtgaaagtttgcggctcaaccgtaaaattgcagttgatactggtagtcttgagtgcagcagaggtaggcggaattcgtggtgtagcggtgaaatgcttagatatcacgaagaactccgattgcgaaggcagcttactggactgtaactgacgctgatgctcgaaagtgtgggtatcaaacaggattagataccctggtagtccacacagtaaacgatgaatactcgctgtttgcgatatacagcaagcggccaagcgaaagcattaagtattccacctggggagtacgccggcaacggtgaaactcaaaggaattgacgggggcccgcacaagcggaggaacatgtggtttaattcgatgatacgcgaggaaccttacccgggcttaaattgcaactgacggatttggaaacagatcttccttcgggcagttgtgaaggtgctgcatggttgtcgtcagctcgtgccgtgaggtgtcggcttaagtgccataacgagcgcaacccttatctttagttactaacaggtcatgctgaggactctagagagactgccgtcgtaagatgtgaggaaggtggggatgacgtcaaatcagcacggcccttacgtccggggctacacacgtgttacaatggggggtacagaaggcagctacacagcgatgtgatgctaatcccaaaagcctctctcagttcggattggagtctgcaacccgactccatgaagctggattcgctagtaatcgcgcatcagccacggcgcggtgaatacgttcccgggccttgtacacaccgcccgtcaagccatgaaagccggggg

SEQ ID NO: 156 - DNA, 1360 bp, Artificial Sequence
  STR00050 Collinsella_aerofaciens_strain_JCM_10188_16S_ribosomal_RNA
  misc_feature (940)..(943): n is a, c, g, or t
  misc_feature (1308)..(1308): n is a, c, g, or t
actgattattttgtgactgagtggcggacgggtgagtaacgcgtgggtaacctgccttgtacagggggataacagttggaaacggctgctaataccgcataagcgcacagcatcgcatgatgcagtgtgaaaaactccggtggtataagatggacccgcgttggattagctagttggtgaggtaacggcccaccaaggcgacgatccatagccgacctgagagggtgaccggccacattgggactgagacacggcccaaactcctacgggaggcagcagtggggaatattgcacaatgggcgaaagcctgatgcagcgacgccgcgtgagcgaagaagtatttcggtatgtaaagctctatcagcagggaagataatgacggtacctgactaagaagcaccggctaaatacgtgccagcagccgcggtaatacgtatggtgcaagcgttatccggatttactgggtgtaaagggagcgcaggcggtgcggcaagtctgatgtgaaagcccggggctcaaccccggtactgcattggaaactgtcgtactagagtgtcggaggggtaagcggaattcctagtgtagcggtgaaatgcgtagatattaggaggaacaccagtggcgaaggcggcttactggacgataactgacgctgaggctcgaaagcgtggggagcaaacaggattagataccctggtagtccacgccgtaaacgatgaatactaggtgttgggaagcattgcttctcggtgccgtcgcaaacgcagtaagtattccacctggggagtacgttcgcaagaatgaaactcaaaaggaattgacggggacccgcacaagcggtggagcatgtggtttaattcgaagcaacgcgaagaaccttaccaagtcttgacatccttctgaccggtacttaaccgtaccttctcttcggagcaggagnnnntgacaggtggtgcatggttgtcgtcagctcgtgtcgtgagatgttggggttaagtcccgcaacgagcgcaacccttatctttagtagccagcggtccggccgggcactctagagagactgccagggataacctggaggaaggcggggatgacgtcaaatcatcatgccccttatgacttgggctacacacgtgctacaatggcgtaaacaaagggaagcaaagctgtgaagccgagcaaatctcaaaaataacgtctcagttcggactgtagtctgcaacccgactacacgaagctggaatcgctagtaatcgcagatcagaatgctgcggtgaatacgttcccgggtcttgtacacaccgcccntcacaccatgggagttgggaatgcccgaagccagtgacctaaccgaaaggaa

SEQ ID NO: 157 - DNA, 1362 bp, Artificial Sequence
  STR00001 Collinsella_aerofaciens_strain_JCM_10188_16S_ribosomal_RNA
  misc_feature (499)..(499): n is a, c, g, or t
  misc_feature (940)..(941): n is a, c, g, or t
tctctaggaagcttgcttccaaagagacttagtggcgaacgggtgagtaacacgtaggtaacctgcccatgtgtctgggataactgctggaaacggtagctaaaaccggataggtatacggagcgcatgctctgtatattaaagcacccttcaaggtgtgaacatggatggacctgcggcgcattagctagttggtgaggtaacggcccaccaaggcgatgatgcgtagccggcctgagagggtaaacggccacattgggactgagacacggcccaaactcctacgggaggcagcagtagggaattttcgtcaatggggggaaccctgaacgagcaatgccgcgtgagtgaagaaggtcttcggatcgtaaagctctgttgtaagtgaagaacggctcatagaggaaatgctatgggagtgacggtagcttaccagaaagccacggctaactacgtgccagcagccgcggtaatacgtaggtggcaagcgttatccggnaatcattgggcgtaaagggtgcgtaggtggcgtactaagtctgtagtaaaaggcaatggctcaaccattgtaagctatggaaactggtaggctagagtgcagaagagggcgatggaattccatgtgtagcggtaaaatgcgtagatatatggaggaacaccagtggcgaaggcggtcgcctggtctgtaactgacactgaggcacgaaagcgtggggagcaaataggattagataccctagtagtccacgccgtaaacgatgagaactaagtgttggaggaattcagtgctgcagttaacgcaataagttctccgcctggggagtatgcacgcaagtgtgaaactcaaaggaattgacgggggcccgcacaagcggtggagtatgtggtttaattcgaagcaacgcgaagaaccttaccaggccttgacatggaaacaaannccctagagatagggagataaatatggatcacacaggtggtgcatggttgtcgtcagctcgtgtcgtgagatgttgggttaagtcccgcaacgagcgcaacccttgtcgcatgttaccagcatcaagttggggactcatgcgagactgccggtgacaaaccggaggaaggtggggatgacgtcaaatcatcatgccccttatggcctgggctacacacgtactacaatggcgaccacaaagagcagcgacttggtgacaagaagcgaatctcataaaggccgtctcagttcggattgaagtctgcaactcgacttcatgaagtcggaatcgctagtaatcgcagatcagcatgctgcggtgaatacgttctcgggccttgtacacaccgcccgtcaaaccatgggagtcagtaatacccgaa

SEQ ID NO: 158 - DNA, 1342 bp, Artificial Sequence
  STR00048 Collinsella_aerofaciens_strain_JCM_10188_16S_ribosomal_RNA
  misc_feature (977)..(977): n is a, c, g, or t
gttttgtgactgagtggcggacgggtgagtaacgcgtgggtaacctgcctcatacagggggataacagttagaaatgactgctaataccgcataagaccacaggatcgcatggtccggtggtaaaaactccggtggtatgagatggacccgcgtctgattaggtagttggtggggtaacggcttaccaaggcgacgatcagtagccgacctgagagggtgaccggccacattgggactgagacacggcccaaactcctacgggaggcagcagtggggaatattgcacaatgggggaaaccctgatgcagcgacgccgcgtgagcgatgaagtatttcggtatgtaaagctctatcagcagggaagaaaatgacggtacctgactaagaagcaccggctaaatacgtgccagcagccgcggtaatacgtatggtgcaagcgttatccggatttactgggtgtaaagggagcgtagacggagaggcaagtctgatgtgaaaacccggggctcaaccccgggactgcattggaaactgtttttctagagtgtcggagaggtaagtggaattcctagtgtagcggtgaaatgcgtagatattaggaggaacaccagtggcgaaggcggcttactggacgatgactgacgttgaggctcgaaagcgtggggagcaaacaggattagataccctggtagtccacgccgtaaacgatgactgctaggtgtcgggaggcaaagcctttcggtgccgcagcaaacgcaataagcagtccacctggggagtacgttcgcaagaatgaaactcaaaggaattgacggggacccgcacaagcggtggagcatgtggtttaattcgaagcaacgcgaagaaccttacctgcccttgacatccggctgaccggcgagtaatgtcgcctttccttcgggacagccgagacaggtggtgcatggttgtcgtcagctcgtgtcgtgagatgttngggttaagtcccgcaacgagcgcaacccttatctttagtagccagcatttcggatgggcactctagagagactgccagggataacctggaggaaggtggggatgacgtcaaatcatcatgccccttatgggcagggctacacacgtgctacaatggcgtaaacaaagggaggcaagcctgcgagggtgagcaaatcccaaaaataacgtctcagttcggattgtagtctgcaactcgactacatgaagctggaatcgctagtaatcgcgaatcagaatgtcgcggtgaatacgttcccgggtcttgtacacaccgcccgtcacaccatgggagttggtaacgcccgaagtcagtgacccaaccgt

SEQ ID NO: 159 - DNA, 1383 bp, Artificial Sequence; identical to SEQ ID NO: 71
  STR00035 Collinsella_aerofaciens_strain_JCM_10188_16S_ribosomal_RNA

SEQ ID NO: 160 - DNA, 1338 bp, Artificial Sequence
  STR00052 Collinsella_aerofaciens_strain_JCM_10188_16S_ribosomal_RNA
  misc_feature (917)..(917): n is a, c, g, or t
cttgctccatgaagttagtggcggacgggtgagtaacgcgtgggtaacctgccctatgcagggggataacgtttggaaacgaacgctaataccgcataacctagttggttcgcatgaaccgactagcaaagattttatcggcataggatggacccgcgttggattagctagttggtgagataacagcccaccaaggcaacgatccatagccggcctgagagggtgaacggccacactgggactgagacacggcccagactcctacgggaggcagcagtggggaatattgcacaatgggcgcaagcctgatgcagcgacgccgcgtgaaggatgaaggtcttcggatcgtaaacttctatcagcagggaagaaaccatgacggtacctgactaagaagccccggctaactacgtgccagcagccgcggtaatacgtagggggcaagcgttatccggaattactgggtgtaaagggtgcgtaggcggcgatttaagtcagatgtgaaaactcagggctcaaccttgagactgcatctgaaactgagttgctagagtgcaggagaggaaagcggaattccgagtgtagcggtgaaatgcgtagagattcggaggaacaccagtagcgaaggcggctttctggactgtaactgacgctgaggcacgaaagcgtggggagcgaacaggattagataccctggtagtccacgccgtaaacgatgaatactaggtgtcggggcttacgggtctcggtgccgcagctaacgcattaagtattccacctgggaagtacgaccgcaaggttgaaactcaaaggaattgacggggacccgcacaagcggtggagcatgtggtttaattcgaagcaacgcgaagaaccttacctaaacttgacatcccttttgaccggacggtaatgcnttcttcactagcttgctagtgcaaaagtgacaggtggtgcatggttgtcgtcagctcgtgtcgtgagatgttgggttaagtcccgcaacgagcgcaacccctatctttagtagccatcattcagttgggcactctagagagactgccagggataacctggaggaaggtggggatgacgtcaaatcatcatgccccttatgtttagggctacacacgtgctacaatgggtgctacaaagggaagcaaatccgcgaggccgagcaaatctcaaaaaagcactcccagttcggattgtagtctgcaactcgactacatgaagttggaatcgctagtaatcgcgaatcagaatgtcgcggtgaatacgttcccgggtcttgtacacaccgcccgtcacaccatgggagttgggggggcccaacgc

SEQ ID NO: 161 - DNA, 1286 bp, Artificial Sequence
  STR00046 Collinsella_aerofaciens_strain_JCM_10188_16S_ribosomal_RNA
  misc_feature (363)..(363): n is a, c, g, or t
  misc_feature (381)..(381): n is a, c, g, or t
  misc_feature (1257)..(1258): n is a, c, g, or t
cgggataactgctggaaacggtagctaaaaccggataggtatgagggaggcatcttcctcatattaaagcaccttcgggtgtgaacatggatggacctgcggcgcattagctggttggtgaggtaacggcccaccaaggcgatgatgcgtagccgacctgagagggtgaacggccacattgggactgagacacggcccaaactcctacgggaggcagcagtagggaattttcgtcaatggggggaaccctgaacgagcaatgccgcgtgtgtgaagaaggtcttcggatcgtaaagcactgttgtaagtgaagaatgccatatagaggaaatgctatgtgggtgacggtagcttaccagaaangccacggctaactacgtngccagcagccgcggtaatacgtaggtggcaagcgttatccggaatcattgggcgtaaagggtgcgtaggtggcacgataagtctgaagtaaaaggcaacagctcaactgttgtatgctttggaaactgtcgagctagagtgcagaagagggcgatggaattccatgtgtagcggtaaaatgcgtagatatatggaggaacaccagtggcgaaggcggtcgcctggtctgtaactgacactgatgcacgaaagcgtggggagcaaataggattagataccctagtagtccacgccgtaaacgatgagaactaagtgttggagagattcagtgctgcagttaacgcaataagttctccgcctggggagtatgcacgcaagtgtgaaactcaaaggaattgacgggggcccgcacaagcggtggagtatgtggtttaattcgaagcaacgcgaagaaccttaccaggccttgacatggatataaatgttctagagatagaaagatagctatatatcacacaggtggtgcatggttgtcgtcagctcgtgtcgtgagatgttgggttaagtcccgcaacgagcgcaacccttgtcttctgttaccagcattaagttggggactcaggagagactgccggtgacaaaccggaggaaggtggggatgacgtcaaatcatcatgccccttatggcctgggctacacacgtactacaatggcgcctacaaagagcagcgacaccgcgaggtggagcgaatctcataaagggcgtctcagttcggattgaagtctgcaactcgacttcatgaagtcggaatcgctagtaatcgcagatcagcatgctgcggtgaatacgttctcgggccttgtacacaccgcccnncaaaccatgggagttggtaatacccgaa

SEQ ID NO: 162 - DNA, 1342 bp, Artificial Sequence
  STR00132.4 Collinsella_aerofaciens_strain_JCM_10188_16S_ribosomal_RNA
  misc_feature (149)..(149): n is a, c, g, or t
agttttcggatggaatccgtataacttagtggcggacgggtgagtaacgcgtgggaaacctgccctgtaccgggggataacacttagaaataggtgctaataccgcataagcgcacggaaccgcatggttctgtgtgaaaaactccggnggtacaggatggtcccgcgtctgattagccagttggcagggtaacggcctaccaaagcgacgatcagtagccggcctgagagggtgaacggccacattgggactgagacacggcccaaactcctacgggaggcagcagtggggaatattgcacaatgggggaaaccctgatgcagcgacgccgcgtgagtgaagaagtatttcggtatgtaaagctctatcagcagggaagaaaatgacggtacctgactaagaagccccggctaactacgtgccagcagccgcggtaatacgtagggggcaagcgttatccggatttactgggtgtaaagggagcgtagacggcatggcaagccagatgtgaaaacccagggctcaaccttgggattgcatttggaactgccaggctggagtgcaggagaggtaagcggaattcctagtgtagcggtgaaatgcgtagatattaggaggaacaccagtggcgaaggcggcttactggactgtaactgacgttgaggctcgaaagcgtggggagcaaacaggattagataccctggtagtccacgcggtaaacgatgattgctaggtgtaggtgggtatggacccatcggtgccgcagctaacgcaataagcaatccacctggggagtacgttcgcaagaatgaaactcaaaggaattgacggggacccgcacaagcggtggagcatgtggtttaattcgaagcaacgcgaagaaccttaccaagtcttgacatcccaatgacgcacctgtaaagaggtgttcccttcggggcaatggagacaggtggtgcatggttgtcgtcagctcgtgtcgtgagatgttgggttaagtcccgcaacgagcgcaacccttattcttagtagccagcaggtaaagctgggcactctaaggagactgccggggataacccggaggaaggcggggatgacgtcaaatcatcatgccccttatgatttgggctacacacgtgctacaatggcgtaaacaaagggaagcgagacagtgatgtggagcaaatcccagaaataacgtctcagttcggattgtagtctgcaactcgactacatgaagctggaatcgctagtaatcgcgaatcagcatgtcgcggtgaatacgttcccgggtcttgtacacaccgcccgtcacaccatgggagttggaaatgcccgaag

SEQ ID NO: 163 - DNA, 1370 bp, Artificial Sequence
  STR00058 Collinsella_aerofaciens_strain_JCM_10188_16S_ribosomal_RNA
  misc_feature (367)..(367): n is a, c, g, or t
  misc_feature (378)..(381): n is a, c, g, or t
  misc_feature (902)..(902): n is a, c, g, or t
  misc_feature (941)..(941): n is a, c, g, or t
attttggaaatctcttcggggatggaattcataacttagtggcggacgggtgagtaacgcgtgagcaatctgcccttaggtgggggataacagccggaaacggctgctaataccgcataacacattgaagccgcatggttttgatgtcaaagatttattgcctttggatgagctcgcgtctgattagctggttggcggggtaacggcccaccaaggcgacgatcagtagccggactgagaggttgaacggccacattgggactgagacacggcccagactcctacgggaggcagcagtggggaatattgcgcaatgggggaaaccctgacgcagcaacgccgcgtgattgaagaaggccttcgggtntgtaaagatcnnnntttaattggggacgaaaaatgacggtacccaaagaataagctccggctaactacgtgccagcagccgcggtaatacgtagggagcaagcgttatccgggatttactgggtgtaaagggcgagtaggcgggctggcaagttgggagtgaaatcccggggcttaaccccggaactgctttcaaaactgctggtcttgagtgatggagaggcaggcggaattccgtgtgtagcggtgaaatgcgtagatatacggaggaacaccagtggcgaaggcggcctgctggacattaactgacgctgaggagcgaaagcgtggggagcaaacaggattagataccctggtagtccacgccgtaaacgatggatactaggtgtgggaggtattgaccccttccgtgccggagttaacacaataagtatcccacctggggagtacggccgcaaggttgaaactcaaaggaattgacgggggcccgcacaagcagtggagtatgtggtttaattcgaagcaacgcgaagaanccttaccaggtcttgacatccctctgaccgccctagagnatagggtttcccttcggggcagaggtgacaggtggtgcatggttgtcgtcagctcgtgtcgtgagatgttgggttaagtcccgcaacgagcgcaacccttacggttagttgatacgcaagatcactctagccggactgccgttgacaaaacggaggaaggtggggacgacgtcaaatcatcatgccccttatgacctgggctacacacgtactacaatggcagtcatacagagggaagcaaaacagtgatgtggagcaaatccctaaaagctgtcccagttcagattgcaggctgcaactcgcctgcatgaagtcggaattgctagtaatcgcggatcagcatgccgcggtgaatacgttcccgggccttgtacacaccgcccgtcacaccatgagagccggtaatacccgaagtccgtagcctaaccg

SEQ ID NO: 164 - DNA, 1312 bp, Artificial Sequence
  STR00120 Collinsella_aerofaciens_strain_JCM_10188_16S_ribosomal_RNA
  misc_feature (12)..(21): n is a, c, g, or t
  misc_feature (23)..(23): n is a, c, g, or t
  misc_feature (58)..(59): n is a, c, g, or t
  misc_feature (61)..(62): n is a, c, g, or t
  misc_feature (946)..(946): n is a, c, g, or t
  misc_feature (1009)..(1009): n is a, c, g, or t
  misc_feature (1294)..(1305): n is a, c, g, or t
gagtggcgaacnnnnnnnnnngngtgaccgacctgccccatacaccggaatagctccnntnnaacgggtggtaatgccggatgctccagttgatcgcatggtcttctgggaaagctttcgcggtatgggatggggtcgcgtcctatcagcttgacggcggggtaacggcccaccgtggcttcgacgggtagccggcctgagagggcgaccggccacattgggactgagatacggcccagactcctacgggaggcagcagtggggaatattgcacaatgggcgcaagcctgatgcagcgacgccgcgtgagggatggaggccttcgggttgtaaacctcttttatcggggagcaagcgagagtgagtttacccgttgaataagcaccggctaactacgtgccagcagccgcggtaatacgtagggtgcaagcgttatccggaattattgggcgtaaagggctcgtaggcggttcgtcgcgtccggtgtgaaagtccatcgcttaacggtggatccgcgccgggtacgggcgggcttgagtgcggtaggggagactggaattcccggtgtaacggtggaatgtgtagatatcgggaagaacaccaatggcgaaggcaggtctctgggccgttactgacgctgaggagcgaaagcgtggggagcgaacaggattagataccctggtagtccacgccgtaaacggtggatgctggatgtggggcccgttccacgggttccgtgtcggagctaacgcgttaagcatcccgcctggggagtacggccgcaaggctaaaactcaaagaaattgacgggggcccgcacaagcggcggagcatgcggattaattcgatgcaacgcgaagaaccttacctgggcttgacatgttcccgacggccgtagagatacggcttccctttcggggcgggttcacagggtggtggcatggtncgtcgtcagctcgtgtcgtgagatgttgggttaagtcccgcaacgagcgcaaccctcgcccgntgttgccagcggattatgccgggaactcacgggggaccgccggggttaactcggaggaaggtggggatgacgtcagatcatcatgccccttacgtccagggcttcacgcatgctacaatggccggtacaacgggatgcgacgcggcgacgcggagcggatccctgaaaaccggtctcagttcggatcgcagtctgcaactcgactgcgtgaaggcggagtcgctagtaatcgcgaatcagcaacgtcgcggtgaatgcgttcccgggccttgtacacaccgcccnnnnnnnnnnnnaaagtgg

SEQ ID NO: 165 - DNA, 1352 bp, Artificial Sequence
  STR00045 Collinsella_aerofaciens_strain_JCM_10188_16S_ribosomal_RNA
  misc_feature (438)..(438): n is a, c, g, or t
agagttttcggacaatggaattggctgtttagtggcggacgggtgagtaacgcgtgagtaacctgccttggagtggggaataacacagtgaaaactgtgctaataccgcatgatatattggtgtcgcatggcgctgatatcaaagatttatcgctctgagatggactcgcgtctgattagatagttggcggggtaacggcccaccaagtcgacgatcagtagccggactgagaggttggccggccacattgggactgagacacggcccagactcctacgggaggcagcagtggggaatattgggcaatgggcgcaagcctgacccagcaacgccgcgtgaaggaagaaggctttcgggttgtaaacttcttttaacagggacgaagcaagtgacggtacctgttgaataagccacggctaactacgtgccagcagccngcggtaatacgtaggtggcaagcgttatccggatttactgggtgtaaagggcgtgtaggcgggactgcaagtcagatgtgaaaactatgggctcaacccatagcctgcatttgaaactgtagttcttgagtgtcggagaggcaatcggaattccgtgtgtagcggtgaaatgcgtagatatacggaggaacaccagtggcgaaggcggattgctggacgataactgacgctgaggcgcgaaagcgtggggagcaaacaggattagataccctggtagtccacgccgtaaacgatggatactaggtgtggggggtctgaccccctccgtgccgcagctaacgcaataagtatcccacctggggagtacgatcgcaaggttgaaactcaaaggaattgacgggggcccgcacaagcggtggagtatgtggtttaattcgaagcaacgcgaagaaccttaccagggcttgacatcctactaacgaaccagagatggattaggtgcccttcggggaaagtagagacaggtggtgcatggttgtcgtcagctcgtgtcgtgagatgttgggttaagtcccgcaacgagcgcaacccttattgttagttgctacgcaagagcactctagcgagactgccgttgacaaaacggaggaaggtggggacgacgtcaaatcatcatgccccttatgtcctgggccacacacgtactacaatggcggttaacagagggaggcaaagccgcgaggcagagcaaacccctaaaagccgtcccagttcggattgcaggctgaaacccgcctgtatgaagtcggaatcgctagtaatcgcggatcagcatgccgcggtgaatacgttcccgggccttgtacacaccgcccgtcacaccatgagagtcgggaacacccgaagtccgtagc

SEQ ID NO: 166 - DNA, 1346 bp, Artificial Sequence
  STR00025.5 Collinsella_aerofaciens_strain_JCM_10188_16S_ribosomal_RNA
  misc_feature (417)..(417): n is a, c, g, or t
aagaaccttcgggggaataagtgattggaaagtggcgaacgggtgagtaacgcgtgggtaacctgccctatggaaaggaatagcctcgggaaactgggagtaaagccttatattatggagagatcgcatggtcatttcatgaaaactccggtgccataggatggacccgcgtcccattagctagttggtgagataacagcccaccaaggcgacgatgggtaaccggtctgagagggcgaacggtcacactggaactgagacacggtccagactcctacgggaggcagcagtggggaatattgcgcaatgggggcaaccctgacgcagcaataccgcgtgagtgaagaaggttttcggatcgtaaagctctgttattggggaagaaaacatgacggtacccaatgaggaagtcccggnctaactacgtgccagcagccgcggtaatacgtaggggacaagcgttgtccggaatgactgggcgtaaagggcgcgtaggcggtctgataagtcagatgtgaaaggtaccggctcaaccggtgacgtgcatttgaaactgtcagacttgagtattggagaggcaagtggaattcctagtgtagcggtgaaatgcgtagatattaggaggaacaccagtggcgaaggcggcttgctggacaaatactgacgctgaggtgcgaaagcgtggggagcgaacaggattagataccctggtagtccacgccgtaaacgatgaatgctaggtgttggggaaactcagtgccgcagttaacacaataagcattccgcctggggagtacgaccgcaaggttgaaactcaaaggaattgacggggacccgcacaagcagcggagcatgtggtttaattcgaagcaacgcgaagaaccttaccaggtcttgacatcctctgacaatcccagagatgggacgtttccttcgggaacagagagacaggtggtgcatggttgtcgtcagctcgtgtcgtgagatgttgggttaagtcccgcaacgagcgcaacccctgcctttagttgccagcattgagttgggcactctagagggactgccgtagacaatacggaggaaggtggggatgacgtcaaatcatcatgccccttatgacctgggctacacacgtgctacaatggtctgaacagagggccgcgaaaccgcgaggtgaagcaaatcccttaaaacagatcccagttcggattgcaggctgcaactcgcctgcatgaagttggagttgctagtaatcgcggatcagaatgccgcggtgaatgcgttcccgggtcttgtacacaccgcccgtcacaccacgagagttggcaacacccgaagcctgtgag

SEQ ID NO: 167 - DNA, 1339 bp, Artificial Sequence
  STR00116 Collinsella_aerofaciens_strain_JCM_10188_16S_ribosomal_RNA
  misc_feature (1310)..(1310): n is a, c, g, or t
ttcttcggattgaagccttggtgactgagcggcggacgggtgagtaacgcgtgggtaacctgcctcatacagggggataacagttggaaacggctgctaataccgcataagcgcacagtaccgcatggtacggtgtgaaaaactccggtggtatgagatggacccgcgtctgattaggtagttggtggggtaacggcctaccaagccgacgatcagtagccgacctgagagggtgaccggccacattgggactgagacacggcccaaactcctacgggaggcagcagtggggaatattgcacaatgggggaaaccctgatgcagcgacgccgcgtgagcgatgaagtatttcggtatgtaaagctctatcagcagggaagaaaatgacggtacctgactaagaagccccggctaactacgtgccagcagccgcggtaatacgtagggggcaagcgttatccggatttactgggtgtaaagggagcgtagacggcatggcaagccagatgtgaaagcccggggctcaaccccgggactgcatttggaactgtcaggctagagtgtcggagaggaaagcggaattcctagtgtagcggtgaaatgcgtagatattaggaggaacaccagtggcgaaggcggctttctggacgatgactgacgttgaggctcgaaagcgtggggagcaaacaggattagataccctggtagtccacgccgtaaacgatgaatactaggtgtcgggtggcaaagccattcggtgccgcagcaaacgcaataagtattccacctggggagtacgttcgcaagaatgaaactcaaaggaattgacggggacccgcacaagcggtggagcatgtggtttaattcgaagcaacgcgaagaaccttacctggtcttgacatccctctgaccgctctttaatcggagctttccttcgggacagaggagacaggtggtgcatggttgtcgtcagctcgtgtcgtgagatgttgggttaagtcccgcaacgagcgcaacccctatctttagtagccagcattttggatgggcactctagagagactgccagggataacctggaggaaggtggggatgacgtcaaatcatcatgccccttatgaccagggctacacacgtgctacaatggcgtaaacaaagggaagcgagcccgcgagggggagcaaatcccaaaaataacgtctcagttcggattgtagtctgcaactcgactacatgaagctggaatcgctagtaatcgcgaatcagaatgtcgcggtgaatacgttcccgggtcttgtacacaccgcccntcacaccatgggagtcagtaacgcccgaa

SEQ ID NO: 168 - DNA, 1320 bp, Artificial Sequence
  STR00128 Collinsella_aerofaciens_strain_JCM_10188_16S_ribosomal_RNA
  misc_feature (876)..(876): n is a, c, g, or t
ggtgagtaacgcgtgggtaacctgcctcatacagggggataacggttagaaatgactgctaataccgcataagcgcacagtaccgcatggtacggtgtgaaaaactccggtggtatgagatggacccgcgtctgattagctggttggtggggtaacggcccaccaaggcgacgatcagtagccgacctgagagggtgaccggccacattgggactgagacacggcccagactcctacgggaggcagcagtgggggatattgcacaatggaggaaactctgatgcagcgacgccgcgtgagtgaagaagtatttcggtatgtaaagctctatcagcagggaagaaaatgacggtacctgactaagaagccccggctaactacgtgccagcagccgcggtaatacgtagggggcaagcgttatccggatttactgggtgtaaagggagcgtagacggcgacgcaagtctgaagtgaaatacccgggctcaacctgggaactgctttggaaactgtgttgctagagtgctggagaggtaagcggaattcctagtgtagcggtgaaatgcgtagatattaggaagaacaccagtggcgaaggcggcttactggacagtaactgacgttgaggctcgaaagcgtggggagcaaacaggattagataccctggtagtccacgccgtaaacgatgaatactaggtgttggtgagcaaagctcatcggtgccgccgcaaacgcaataagtattccacctggggagtacgttcgcaagaatgaaactcaaaggaattgacggggacccgcacaagcggtggagcatgtggtttaattcgaagcaacgcgaagaaccttaccaaatcttgacatccctctgaaaancctttaatcgggctcctccttcgggacagaggtgacaggtggtgcatggttgtcgtcagctcgtgtcgtgagatgttgggttaagtcccgcaacgagcgcaacccctattgtcagtagccagcaggtcaagctgggcactctgatgagactgccagggataacctggaggaaggtggggatgacgtcaaatcatcatgccccttatgatttgggctacacacgtgctacaatggcgtaaacaaagagaagcgagcctgcgagggggagcaaatctcaaaaataacgtctcagttcggattgtagtctgcaactcgactacatgaagctggaatcgctagtaatcgcagatcagaatgctgcggtgaatacgttcccgggtcttgtacacaccgcccgtcacaccatgggagtcggaaatgcccgaagccagtgacccaagcgaa

SEQ ID NO: 169 - DNA, 1370 bp, Artificial Sequence
  STR00051 Collinsella_aerofaciens_strain_JCM_10188_16S_ribosomal_RNA
gcagcaatgctcgagtggcgaacgggtgagtaatacataagtaacctgccctagacagggggataactgctggaaacggcagctaagaccgcataggtatggacactgcatggtgaccatattaaaagtgccaaggcactggtagaggatggacttatggcgcattagctggttggtgaggtaacggctcaccaaggcgacgatgcgtagccgacctgagagggtgaccggccacactgggactgagacacggcccagactcctacgggaggcagcagtagggaattttcggcaatggggggaaccctgaccgagcaacgccgcgtgaaggaagaaggaattcgttctgtaaacttctgttataaaggaagaacggcggatatagggaatgatatccgagtgacggtactttatgagaaagccacggctaactacgtgccagcagccgcggtaatacgtaggtggcgagcgttatccggaattattgggcgtaaagagggagcaggcggcggcagaggtctgtggtgaaagactgaagcttaacttcagtaagccatagaaacccgggctgctagagtgcaggagaggatcgtggaattccatgtgtagcggtgaaatgcgtagatatatggaggaacaccagtggcgaaggcgacggtctggcctgtaactgacgctcattcccgaaagcgtggggagcaaataggattagataccctagtagtccacgccgtaaacgatgagtactaagtgttgggagtcaaatttcagtgctgcagttaacgcaataagtactccgcctgagtagtacgttcgcaagaatgaaactcaaaggaattgacgggggcccgcacaagcggtggagcatgtggtttaattcgaagcaacgcgaagaaccttaccaggtcttgacatccggataaagacctcagagatgaggggatagatatatccgagacaggtggtgcatggttgtcgtcagctcgtgtcgtgagatgttgggttaagtcccgcaacgagcgcaacccttgtcgctagttaccatcattaagttggggactctagcgagactgccagtgacaagctggaggaaggcggggatgacgtcaaatcatcatgccccttatgacctgggctacacacgtgctacaatggatggagcagagggaagcgaagccgcgaggtgaagcaaaacccataaaaccattctcagttcggattgtagtctgcaactcgactacatgaagttggaatcgctagtaatcgcgaatcagcatgtcgcggtgaatacgttctcgggccttgtacacaccgcccgtcacaccatgagagttgataacacccgaagccggtggcctaaccgcaaggag

SEQ ID NO: 170 - DNA, 1333 bp, Artificial Sequence
  STR00037 Collinsella_aerofaciens_strain_JCM_10188_16S_ribosomal_RNA
  misc_feature (353)..(356): n is a, c, g, or t
  misc_feature (940)..(943): n is a, c, g, or t
cggagagagcggcggacgggtgagtaacgcgtgggtaacctgccctgtacacacggataacataccgaaaggtatactaatacgggataacatatgaaagtcgcatggcttttgtatcaaagctccggcggtacaggatggacccgcgtctgattagctagttggtaaggtaatggcttaccaaggcaacgatcagtagccgacctgagagggtgatcggccacactggaactgagacacggtccagactcctacgggaggcagcagtggggaatattgcacaatgggcgaaagcctgatgcagcaacgccgcgtgagcgatgaaggccttcgggtcgtaaagctctgtcctnnnncaaggaagataatgacggtacttgaggaggaagccccggctaactacgtgccagcagccgcggtaatacgtagggggctagcgttatccggaattactgggcgtaaagggtgcgtaggtggttttttaagtcagaagtgaaaggctacggctcaaccgtagtaagcttttgaaactagagaacttgagtgcaggagaggagagtagaattcctagtgtagcggtgaaatgcgtagatattaggaggaataccagtagcgaaggcggctctctggactgtaactgacactgaggcacgaaagcgtggggagcaaacaggattagataccctggtagtccacgccgtaaacgatgagtactaggtgtcgggggttacccccctcggtgccgcagctaacgcattaagtactccgcctgggaagtacgctcgcaagagtgaaactcaaaggaattgacggggacccgcacaagtagcggagcatgtggtttaattcgaagcaacgcgaagaaccttacctaagcttgacatcccactgacctctccctaatcggagatttcccttcggggacagtggtgacaggtgnnnngtgcatggttgtcgtcagctcgtgtcgtgagatgttgggttaagtcccgcaacgagcgcaacccttgcctttagttgccagcattaagttgggcactctagagggactgccgaggataactcggaggaaggtggggatgacgtcaaatcatcatgccccttatgcttagggctacacacgtgctacaatgggtggtacagagggttgccaagccgcgaggtggagctaatcccttaaagccattctcagttcggattgtaggctgaaactcgcctacatgaagctggagttactagtaatcgcagatcagaatgctgcggtgaatgcgttcccgggtcttgtacacaccgcccgtcacaccatggaagttgggggcgcccgaagccggtt

SEQ ID NO: 171 - DNA, 1338 bp, Artificial Sequence
  STR00056 Collinsella_aerofaciens_strain_JCM_10188_16S_ribosomal_RNA
  misc_feature (897)..(897): n is a, c, g, or t
  misc_feature (917)..(917): n is a, c, g, or t
cttgctccatgaagttagtggcggacgggtgagtaacgcgtgggtaacctgccctatgcagggggataacgtttggaaacgaacgctaataccgcataacctagttggttcgcatgaaccgactagcaaagattttatcggcataggatggacccgcgttggattagctagttggtgagataacagcccaccaaggcaacgatccatagccggcctgagagggtgaacggccacactgggactgagacacggcccagactcctacgggaggcagcagtggggaatattgcacaatgggcgcaagcctgatgcagcgacgccgcgtgaaggatgaaggtcttcggatcgtaaacttctatcagcagggaagaaaccatgacggtacctgactaagaagccccggctaactacgtgccagcagccgcggtaatacgtagggggcaagcgttatccggaattactgggtgtaaagggtgcgtaggcggcgatttaagtcagatgtgaaaactcagggctcaaccttgagactgcatctgaaactgagttgctagagtgcaggagaggaaagcggaattccgagtgtagcggtgaaatgcgtagagattcggaggaacaccagtagcgaaggcggctttctggactgtaactgacgctgaggcacgaaagcgtggggagcgaacaggattagataccctggtagtccacgccgtaaacgatgaatactaggtgtcggggcttacgggtctcggtgccgcagctaacgcattaagtattccacctgggaagtacgaccgcaaggttgaaactcaaaggaattgacggggacccgcacaagcggtggagcatgtggtttaattcgaagcaacgcgaagaaccttacctaaacttgacatcctntttgaccggacggtaatgcnttcttcactagcttgctagtgcaaaagtgacaggtggtgcatggttgtcgtcagctcgtgtcgtgagatgttgggttaagtcccgcaacgagcgcaacccctatctttagtagccatcattcagttgggcactctagagagactgccagggataacctggaggaaggtggggatgacgtcaaatcatcatgccccttatgtttagggctacacacgtgctacaatgggtgctacaaagggaagcaaatccgcgaggccgagcaaatctcaaaaaagcactcccagttcggattgtagtctgcaactcgactacatgaagttggaatcgctagtaatcgcgaatcagaatgtcgcggtgaatacgttcccgggtcttgtacacaccgcccgtcacaccatgggagttgggggggcccaacgc

SEQ ID NO: 172 - DNA, 1347 bp, Artificial Sequence
  STR00036 Collinsella_aerofaciens_strain_JCM_10188_16S_ribosomal_RNA
gatggcgaccggcgcacgggtgagtaacacgtatccaacctgccgataactcggggatagcctttcgaaagaaagattaatacccgatggcataatagaaccgcatggtttgattattaaagaatttcggttatcgatggggatgcgttccattaggcagttggtggggtaacggcccaccaaaccttcgatggataggggttctgaaaggaaggtcccccacattggaactgagacacggtccaaactcctacgggaggcagcagtgaggaatattggtcaatggacgagagtctgaaccagccaagtagcgtgaaggatgactgccctatgggttgtaaacttcttttatatgggaataaagtgatccacgtgtggatttttgtatgtaccatatgaataaggatcggctaactccgtgccagcagccgcggtaatacggaggatccgagcgttatccggatttattgggtttaaagggagcgtaggtggacagttaagtcagttgtgaaagtttgcggctcaaccgtaaaattgcagttgatactggctgtcttgagtacagtagaggtgggcggaattcgtggtgtagcggtgaaatgcttagatatcacgaagaactccgattgcgaaggcagctcactggactgcaactgacactgatgctcgaaagtgtgggtatcaaacaggattagataccctggtagtccacacagtaaacgatgaatactcgctgtttgcgatatacagtaagcggccaagcgaaagcattaagtattccacctggggagtacgccggcaacggtgaaactcaaaggaattgacgggggcccgcacaagcggaggaacatgtggtttaattcgatgatacgcgaggaaccttacccgggcttaaattgcatttgaatatattggaaacagtatagtcgtaagacaaatgtgaaggtgctgcatggttgtcgtcagctcgtgccgtgaggtgtcggcttaagtgccataacgagcgcaacccttatcttcagttactaacaggtcatgctgaggactctggagagactgccgtcgtaagatgtgaggaaggtggggatgacgtcaaatcagcacggcccttacgtccggggctacacacgtgttacaatggggggtacagaaggccgctacctggtgacaggatgctaatcccaaaagcctctctcagttcggatcgaagtctgcaacccgacttcgtgaagctggattcgctagtaatcgcgcatcagccatggcgcggtgaatacgttcccgggccttgtacacaccgcccgtcaagccatgaaagccgggggtacctgaagtacgtaaccgcaa

SEQ ID NO: 173 - DNA, 1090 bp, Artificial Sequence
  STR00135 Collinsella_aerofaciens_strain_JCM_10188_16S_ribosomal_RNA
  misc_feature (870)..(870): n is a, c, g, or t
  misc_feature (872)..(872): n is a, c, g, or t
  misc_feature (888)..(888): n is a, c, g, or t
  misc_feature (961)..(961): n is a, c, g, or t
  misc_feature (995)..(995): n is a, c, g, or t
ctgagacacggcccaaactcctacgggaggcagcagtagggaattttcggcaatgggcgaaagcctgaccgagcaacgccgcgtgagtgaagaaggccttcgggttgtaaagctctgttgtgaaggaagaacggctcatagagggaatgctatgggagtgacggtactttaccagaaagccacggctaactacgtgccagcagccgcggtaatacgtaggtggcgagcgttatccggaattattgggcgtaaagggtgcgcaggcggtttgaaaagtttaaggtgaaagcgtggggcttaaccccatacagccttagaaactgtcagactagagtacaggagagggcaatggaattccatgtgtagcggtaaaatgcgtagatatatggaggaacaccagtggcgaaggcggttgcctggcctgtaactgacgctcatgcacgaaagcgtggggagcaaataggattagataccctagtagtccacgccgtaaacgatgagaactaagtgttggggaaactcagtgctgcagttaacgcaataagttctccgcctggggagtatgcacgcaagtgtgaaactcaaaggaattgacgggggcccgcacaagcggtggagtatgtggtttaattcgacgcaacgcgaagaaccttaccaggtcttgacataccaggcaaagctatagagatatagtggaggctatcctggatacaggtggtgcatggttgtcgtcagctcgtgtcgtgagatgttgggttaagtcccgcaacgagcgcaacccttgtctttagttactaacattaagttgaggactctagagagactgccggtgacaaaccggaggaaggtggggatgacgtcaaatcatcnancccttatgacctgggntacacacgtactacaatggcggatacaacgagaagcaagacagcaatgtggagcaaacctcagaaagtccgtntcagttcggattgaagtttgcaacccgacttcangaagccggaatcgctagtaatcgcggatcagcatgccgcggtgaatacgttctcgggccttgtacaccccgcccgtcaaaccatgagagttggca

SEQ ID NO: 174 - DNA, 1356 bp, Artificial Sequence
  STR00124 Collinsella_aerofaciens_strain_JCM_10188_16S_ribosomal_RNA
gaggggcagcatgaacttagcttgctaagtttgatggcgaccggcgcacgggtgagtaacacgtatccaacctgccgatgactcggggatagcctttcgaaagaaagattaatacccgatggcatagttcttccgcatggtggaactattaaagaatttcggtcatcgatggggatgcgttccattaggttgttggcggggtaacggcccaccaagccttcgatggataggggttctgagaggaaggtcccccacattggaactgagacacggtccaaactcctacgggaggcagcagtgaggaatattggtcaatggacgagagtctgaaccagccaagtagcgtgaaggatgactgccctatgggttgtaaacttcttttatacgggaataaagtgaggcacgtgtgcctttttgtatgtaccgtatgaataaggatcggctaactccgtgccagcagccgcggtaatacggaggatccgagcgttatccggatttattgggtttaaagggagcgtaggcggacgcttaagtcagttgtgaaagtttgcggctcaaccgtaaaattgcagttgatactgggtgtcttgagtacagtagaggcaggcggaattcgtggtgtagcggtgaaatgcttagatatcacgaagaactccgattgcgaaggcagcctgctggactgtaactgacgctgatgctcgaaagtgtgggtatcaaacaggattagataccctggtagtccacacagtaaacgatgaatactcgctgtttgcgatatacagtaagcggccaagcgaaagcgttaagtattccacctggggagtacgccggcaacggtgaaactcaaaggaattgacgggggcccgcacaagcggaggaacatgtggtttaattcgatgatacgcgaggaaccttacccgggcttgaattgcaactgaatgatgtggagacatgtcagccgcaaggcagttgtgaaggtgctgcatggttgtcgtcagctcgtgccgtgaggtgtcggcttaagtgccataacgagcgcaacccttatcgatagttaccatcaggtgatgctggggactctgtcgagactgccgtcgtaagatgtgaggaaggtggggatgacgtcaaatcagcacggcccttacgtccggggctacacacgtgttacaatggggggtacagaaggcagctacacggcgacgtgatgctaatcccgaaagcctctctcagttcggattggagtctgcaacccgactccatgaagctggattcgctagtaatcgcgcatcagccacggcgcggtgaatacgttcccgggccttgtacacaccgcccgtcaagccatgaaagccgggg

SEQ ID NO: 175 - DNA, 1361 bp, Artificial Sequence
  STR00041 Collinsella_aerofaciens_strain_JCM_10188_16S_ribosomal_RNA
  misc_feature (954)..(954): n is a, c, g, or t
ttgaagtttttgtgactgagtggcggacgggtgagtaacgcgtgggtaacctgcctcatacagggggataacagttagaaatgactgctaataccgcataagcgcacagtgctgcatggcacagtgtgaaaaactccggtggtatgagatggacccgcgtctgattagctagttggtggggtaacggcctaccaaggcgacgatcagtagccggcctgagagggtgaacggccacattgggactgagacacggcccaaactcctacgggaggcagcagtggggaatattgcacaatgggggaaaccctgatgcagcgacgccgcgtgagcgaagaagtatttcggtatgtaaagctctatcagcagggaagaaaatgacggtacctgactaagaagcaccggctaaatacgtgccagcagccgcggtaatacgtatggtgcaagcgttatccggatttactgggtgtaaagggagcgtagacggttgtgtaagtctgatgtgaaagcccggggctcaaccccgggactgcattggaaactatgtaactagagtgtcggagaggtaagcggaattcctagtgtagcggtgaaatgcgtagatattaggaggaacaccagtggcgaaggcggcttactggacgatcactgacgttgaggctcgaaagcgtggggagcaaacaggattagataccctggtagtccacgccgtaaacgatgactactaggtgtcggggagcaaagctcttcggtgccgcagcaaacgcaataagtagtccacctggggagtacgttcgcaagaatgaaactcaaaggaattgacggggacccgcacaagcggtggagcatgtggtttaattcgaagcaacgcgaagaaccttacctggtcttgacatcccggtgaccggcaagtaatgttgcctttccttcgggacaccgggtgacaggtggtgcatnggttgtcgtcagctcgtgtcgtgagatgttgggttaagtcccgcaacgagcgcaacccctatcttcagtagccagcatttaaggtgggcactctggagagactgccagggataacctggaggaaggtggggatgacgtcaaatcatcatgccccttatgaccagggctacacacgtgctacaatggcgtaaacaaagggaagcgaacctgtgaggggaagcaaatctcaaaaataacgtctcagttcggattgtagtctgcaactcgactacatgaagctggaatcgctagtaatcgcgaatcagcatgtcgcggtgaatacgttcccgggtcttgtacacaccgcccgtcacaccatgggagtcagtaacgcccgaagtcagtgacccaaccgtaaggagggagct

SEQ ID NO: 176 - DNA, 1360 bp, Artificial Sequence
  STR00121 Collinsella_aerofaciens_strain_JCM_10188_16S_ribosomal_RNA
  misc_feature (465)..(465): n is a, c, g, or t
  misc_feature (927)..(927): n is a, c, g, or t
ttttcggatggatttcctatatgactgagtggcggacgggtgagtaacgcgtggggaacctgccctatacagggggataacagctggaaacggctgctaataccgcataagcgcacagaatcgcatgattcagtgtgaaaagccctggcagtataggatggtcccgcgtctgattagctggttggtgaggtaacggctcaccaaggcgacgatcagtagccggcttgagagagtgaacggccacattgggactgagacacggcccaaactcctacgggaggcagcagtggggaatattgcacaatgggggaaaccctgatgcagcgacgccgcgtgagtgaagaagtatttcggtatgtaaagctctatcagcagggaagaaaacagacggtacctgactaagaagccccggctaactacgtgccagcagccgcggtaatacgtagggggcaagcgttatccggnaattactgggtgtaaaagggtgcgtaggtggcatggtaagtcagaagtgaaagcccggggcttaaccccgggactgcttttgaaactgtcatgctggagtgcaggagaggtaagcggaattcctagtgtagcggtgaaatgcgtagatattaggaggaacaccagtggcgaaggcggcttactggactgtcactgacactgatgcacgaaagcgtggggagcaaacaggattagataccctggtagtccacgccgtaaacgatgaatactaggtgtcggggccgtagaggcttcggtgccgcagcaaacgcagtaagtattccacctggggagtacgttcgcaagaatgaaactcaaaggaattgacggggacccgcacaagcggtggagcatgtggtttaattcgaagcaacgcgaagaaccttacctggtcttgacatcccaatgaccgaaccttaaccnggttttttctttcgagacattggagacaggtggtgcatggttgtcgtcagctcgtgtcgtgagatgttgggttaagtcccgcaacgagcgcaacccctatctttagtagccagcatttaagatgggcactctagagagactgccagggataacctggaggaaggtggggacgacgtcaaatcatcatgccccttatggccagggctacacacgtgctacaatggcgtaaacaaagggaagcgaagtcgtgaggcgaagcaaatcccagaaataacgtctcagttcggattgtagtctgcaactcgactacatgaagctggaatcgctagtaatcgtgaatcagaatgtcacggtgaatacgttcccgggtcttgtacacaccgcccgtcacaccatgggagtcagtaacgcccgaagtcagtgacccaaccgc

SEQ ID NO: 177 - DNA, 1343 bp, Artificial Sequence
  STR00131 Collinsella_aerofaciens_strain_JCM_10188_16S_ribosomal_RNA
aagaaccttcgggggaataagtgattggaaagtggcgaacgggtgagtaacgcgtgggtaacctgccctatggaaaggaatagcctcgggaaactgggagtaaagccttatattatggagagatcgcatggtcatttcatgaaaactccggtgccataggatggacccgcgtcccattagctagttggtgagataacagcccaccaaggcgacgatgggtaaccggtctgagagggcgaacggtcacactggaactgagacacggtccagactcctacgggaggcagcagtggggaatattgcgcaatgggggcaaccctgacgcagcaataccgcgtgagtgaagaaggttttcggatcgtaaagctctgttattggggaagaaaacatgacggtacccaatgaggaagtcccggctaactacgtgccagcagccgcggtaatacgtaggggacaagcgttgtccggaatgactgggcgtaaagggcgcgtaggcggtctgataagtcagatgtgaaaggtaccggctcaaccggtgacgtgcatttgaaactgtcagacttgagtattggagaggcaagtggaattcctagtgtagcggtgaaatgcgtagatattaggaggaacaccagtggcgaaggcggcttgctggacaaatactgacgctgaggtgcgaaagcgtggggagcgaacaggattagataccctggtagtccacgccgtaaacgatgaatgctaggtgttggggaaactcagtgccgcagttaacacaataagcattccgcctggggagtacgaccgcaaggttgaaactcaaaggaattgacggggacccgcacaagcagcggagcatgtggtttaattcgaagcaacgcgaagaaccttaccaggtcttgacatcctctgacaatcccagagatgggacgtttccttcgggaacagagagacaggtggtgcatggttgtcgtcagctcgtgtcgtgagatgttgggttaagtcccgcaacgagcgcaacccctgcctttagttgccagcattgagttgggcactctagagggactgccgtagacaatacggaggaaggtggggatgacgtcaaatcatcatgccccttatgacctgggctacacacgtgctacaatggtctgaacagagggccgcgaaaccgcgaggtgaagcaaatcccttaaaacagatcccagttcggattgcaggctgcaactcgcctgcatgaagttggagttgctagtaatcgcggatcagaatgccgcggtgaatgcgttcccgggtcttgtacacaccgcccgtcacaccacgagagttggcaacacccgaagcctgtg

SEQ ID NO: 178 - DNA, 1378 bp, Artificial Sequence
  STR00093 Collinsella_aerofaciens_strain_JCM_10188_16S_ribosomal_RNA
ttatttaaatagaacccttcggggtgacgttttaataacttagtggcggacgggtgagtaacgcgtgagtaacctgcctttcagagggggataacgtcctgaaaaggacgctaataccgcatgatatatttgtgccgcatggtatggatatcaaaggagcaatccgctggaagatggactcgcgtccgattagctagttggaggggtaacggcccaccaaggcgacgatcggtagccggactgagaggttgaacggccacattgggactgagacacggcccagactcctacgggaggcagcagtgggggatattgcgcaatgggggaaaccctgacgcagcaacgccgcgtgaaggaagaaggttttcggattgtaaacttcttttctaagggacgaagaagtgacggtaccttaggaataagctccggctaactacgtgccagcagccgcggtaatacgtagggagcaagcgttgtccggatttactgggtgtaaagggtgcgtaggcggcaatgcaagtcagatgtgaaatgcacgggctcaacccgtgagctgcatttgaaactgtgttgcttgagtgaggtagaggcaggcggaattcccggtgtagcggtgaaatgcgtagagatcgggaggaacaccagtggcgaaggcggcctgctgggccttaactgacgctgatgcacgaaagcgtgggtagcaaacaggattagataccctggtagtccacgctgtaaacgatgattactaggtgtggggggtctgaccccttccgtgccgcagttaacacaataagtaatccacctggggagtacggccgcaaggttgaaactcaaaggaattgacgggggcccgcacaagcagtggagtatgtggtttaattcgaagcaacgcgaagaaccttaccaggtcttgacatccagctaacgaagtagagatacattaggtgcccttcggggaaagctgagacaggtggtgcatggttgtcgtcagctcgtgtcgtgagatgttgggttaagtcccgcaacgagcgcaacccttgctgttagttgctacgcaagagcactctaacaggactgccgttgacaaaacggaggaaggtggggacgacgtcaaatcatcatgccccttatgacctgggctacacacgtactacaatggccgtcaacagagggaagcaagaccgcgaggtggagcaaacccccaaaaacggccccagttcggattgtaggctgcaacccgcctacatgaagtcggaattgctagtaatcgcggatcagcatgccgcggtgaatacgttcccgggccttgtacacaccgcccgtcacaccatgggagccggtaatacccgaagtcagtagcctaaccgcaaggagg

SEQ ID NO: 179 - DNA, 1283 bp, Artificial Sequence
  STR00100 Collinsella_aerofaciens_strain_JCM_10188_16S_ribosomal_RNA
ccgtctactcttggacagccttctgaaaggaagattaatacaagatggcatcatgagtccgcatgttcacatgattaaaggtattccggtagacgatggggatgcgttccattagatagtaggcggggtaacggcccacctagtcttcgatggataggggttctgagaggaaggtcccccacattggaactgagacacggtccaaactcctacgggaggcagcagtgaggaatattggtcaatgggcgagagcctgaaccagccaagtagcgtgaaggatgactgccctatgggttgtaaacttcttttataaaggaataaagtcgggtatggatacccgtttgcatgtactttatgaataaggatcggctaactccgtgccagcagccgcggtaatacggaggatccgagcgttatccggatttattgggtttaaagggagcgtagatggatgtttaagtcagttgtgaaagtttgcggctcaaccgtaaaattgcagttgatactggatatcttgagtgcagttgaggcaggcggaattcgtggtgtagcggtgaaatgcttagatatcacgaagaactccgattgcgaaggcagcctgctaagctgcaactgacattgaggctcgaaagtgtgggtatcaaacaggattagataccctggtagtccacacggtaaacgatgaatactcgctgtttgcgatatactgcaagcggccaagcgaaagcgttaagtattccacctggggagtacgccggcaacggtgaaactcaaaggaattgacgggggcccgcacaagcggaggaacatgtggtttaattcgatgatacgcgaggaaccttacccgggcttaaattgcagatgaattacggtgaaagccgtaagccgcaaggcatctgtgaaggtgctgcatggttgtcgtcagctcgtgccgtgaggtgtcggcttaagtgccataacgagcgcaacccttgttgtcagttactaacaggttttgctgaggactctgacaagactgccatcgtaagatgtgaggaaggtggggatgacgtcaaatcagcacggcccttacgtccggggctacacacgtgttacaatggggggtacagagggccgctaccacgcgagtggatgccaatccccaaaacctctctcagttcggactggagtctgcaacccgactccacgaagctggattcgctagtaatcgcgcatcagccacggcgcggtgaatacgttcccgggccttgtacacaccgcccgtcaagccatgggagccgggg

SEQ ID NO: 180 - DNA, 1360 bp, Artificial Sequence
  STR00127 Collinsella_aerofaciens_strain_JCM_10188_16S_ribosomal_RNA
  misc_feature (47)..(54): n is a, c, g, or t
gcgaagcactttgcttagattcttcggatgaagaggattgtgactgnnnnnnnnggacgggtgagtaacgcgtgggtaacctgcctcatacagggggataacagttagaaatgactgctaataccgcataagaccacagcaccgcatggtgcgggggtaaaaactccggtggtatgagatggacccgcgtctgattagctagttggtaaggtaacggcttaccaaggcgacgatcagtagccgacctgagagggtgaccggccacattgggactgagacacggcccaaactcctacgggaggcagcagtggggaatattgcacaatgggggaaaccctgatgcagcgacgccgcgtgagcgaagaagtatttcggtatgtaaagctctatcagcagggaagaaaatgacggtacctgactaagaagcaccggctaaatacgtgccagcagccgcggtaatacgtatggtgcaagcgttatccggatttactgggtgtaaagggagcgtagacggatgggcaagtctgatgtgaaaacccggggctcaaccccgggactgcattggaaactgttcatctagagtgctggagaggtaagtggaattcctagtgtagcggtgaaatgcgtagatattaggaggaacaccagtggcgaaggcggcttactggacagtaactgacgttgaggctcgaaagcgtggggagcaaacaggattagataccctggtagtccacgccgtaaacgatgactactaggtgtcgggtggcaaagccattcggtgccgcagcaaacgcaataagtagtccacctggggagtacgttcgcaagaatgaaactcaaaggaattgacggggacccgcacaagcggtggagcatgtggtttaattcgaagcaacgcgaagaaccttacctgctcttgacatcccgctgaccggacggtaatgcgtccttcccttcggggcagcggagacaggtggtgcatggttgtcgtcagctcgtgtcgtgagatgttgggttaagtcccgcaacgagcgcaacccctatctttagtagccagcggccaggccgggcactctagagagactgccggggataacccggaggaaggtggggatgacgtcaaatcatcatgccccttatgagcagggctacacacgtgctacaatggcgtaaacaaagggaagcgagaccgcgaggtggagcaaatcccaaaaataacgtctcagttcggattgtagtctgcaactcgactacatgaagctggaatcgctagtaatcgcgaatcagaatgtcgcggtgaatacgttcccgggtcttgtacacaccgcccgtcacaccatgggagtcagtaacgcccgaa

SEQ ID NO: 181 - DNA, 1384 bp, Artificial Sequence
  STR00082 Collinsella_aerofaciens_strain_JCM_10188_16S_ribosomal_RNA
  misc_feature (1012)..(1012): n is a, c, g, or t
  misc_feature (1061)..(1061): n is a, c, g, or t
cgaagcactttatttgatttcttcggaatgaagattttgtgactgagtggcggacgggtgagtaacgcgtgggtaacctgcctcatacagggggataacagttggaaacgactgctaataccgcataagcgcacagggtcgcatgacctggtgtgaaaaactccggtggtatgagatggacccgcgtctgattagccagttggtggggtaacggcctaccaaagcgacgatcagtagccgacctgagagggtgaccggccacattgggactgagacacggcccaaactcctacgggaggcagcagtggggaatattgcacaatgggggaaaccctgatgcagcgacgccgcgtgagcgaagaagtatttcggtatgtaaagctctatcagcagggaagaagaaatgacggtacctgactaagaagcaccggctaaatacgtgccagcagccgcggtaatacgtatggtgcaagcgttatccggatttactgggtgtaaagggagcgcaggcggtacggcaagtctgatgtgaaagcccggggctcaaccccggtactgcattggaaactgtcggactagagtgtcggaggggtaagtggaattcctagtgtagcggtgaaatgcgtagatattaggaggaacaccagtggcgaaggcggcttactggacgattactgacgctgaggctcgaaagcgtggggagcaaacaggattagataccctggtagtccacgccgtaaacgatgaatactaggtgtcggggagcattgctcttcggtgccgcagcaaacgcaataagtattccacctggggagtacgttcgcaagaatgaaactcaaaggaattgacggggacccgcacaagcggtggagcatgtggtttaattcgaagcaacgcgaagaaccttaccaagtcttgacatcccgatgacagaacatgtaatgtgttttctcttcggagcatcggtgacaggtggtgcatggttgtcgtcagctcgtgtcgtgagatgttngggttaagtcccgcaacgagcgcaacccctattcttagtagccagcggntaggccgggcactctagggagactgccagggataacctggaggaaggtggggatgacgtcaaatcatcatgccccttatgacttgggctacacacgtgctacaatggcgtaaacaaagggaagcgagcctgcgagggggagcaaatctcaaaaataacgtctcagttcggactgcagtctgcaactcgactgcacgaagctggaatcgctagtaatcgcgaatcagaatgtcgcggtgaatacgttcccgggtcttgtacacaccgcccgtcacaccatgggagttggtaatgcccgaagtcagtgacccaaccgcaaggagg

SEQ ID NO: 182 - DNA, 1393 bp, Artificial Sequence
  STR00123 Collinsella_aerofaciens_strain_JCM_10188_16S_ribosomal_RNA
tcgaacgcgttggcccaattgattgatggtgcttgcacctgattgattttggtcgccaacgagtggcggacgggtgagtaacacgtaggtaacctgcccagaagcgggggacaacatttggaaacagatgctaataccgcataacagcgttgttcgcatgaacaacgcttaaaagatggcttctcgctatcacttctggatggacctgcggtgcattagcttgttggtggggtaacggcctaccaaggcgatgatgcatagccgagttgagagactgatcggccacaatgggactgagacacggcccatactcctacgggaggcagcagtagggaatcttccacaatgggcgcaagcctgatggagcaacaccgcgtgagtgaagaagggtttcggctcgtaaagctctgttgttaaagaagaacacgtatgagagtaactgttcatacgttgacggtatttaaccagaaagtcacggctaactacgtgccagcagccgcggtaatacgtaggtggcaagcgttatccggatttattgggcgtaaagagagtgcaggcggttttctaagtctgatgtgaaagccttcggcttaacccggagaagtgcatcggaaactggataacttgagtgcagaagagggtagtggaactccatgtgtagcggtggaatgcgtagatatatggaagaacaccagtggcgaaggcggctacctggtctgcaactgacgctgagactcgaaagcatgggtagcgaacaggattagataccctggtagtccatgccgtaaacgatgagtgctaggtgttggagggtttccgcccttcagtgccggagctaacgcattaagcactccgcctggggagtacgaccgcaaggttgaaactcaaaggaattgacgggggcccgcacaagcggtggagcatgtggtttaattcgaagctacgcgaagaaccttaccaggtcttgacatcttgcgccaaccctagagatagggcgtttccttcgggaacgcaatgacaggtggtgcatggtcgtcgtcagctcgtgtcgtgagatgttgggttaagtcccgcaacgagcgcaacccttgttactagttgccagcattaagttgggcactctagtgagactgccggtgacaaaccggaggaaggtggggacgacgtcagatcatcatgccccttatgacctgggctacacacgtgctacaatggacggtacaacgagtcgcgaactcgcgagggcaagcaaatctcttaaaaccgttctcagttcggactgcaggctgcaactcgcctgcacgaagtcggaatcgctagtaatcgcggatcagcatgccgcggtgaatacgttcccgggccttgtacacaccgcccgtcacaccatgagagt

SEQ ID NO: 183 - DNA, 1371 bp, Artificial Sequence
  STR00092.5 Collinsella_aerofaciens_strain_JCM_10188_16S_ribosomal_RNA
gcacttgtgctcgagtggcgaacgggtgagtaatacataagtaacctgccctagacagggggataactattggaaacgatagctaagaccgcataggtacggacactgcatggtgaccgtattaaaagtgcctcaaagcactggtagaggatggacttatggcgcattagctggttggcggggtaacggcccaccaaggcgacgatgcgtagccgacctgagagggtgaccggccacactgggactgagacacggcccagactcctacgggaggcagcagtagggaattttcggcaatgggggaaaccctgaccgagcaacgccgcgtgaaggaagaaggttttcggattgtaaacttctgttataaaggaagaacggcggctacaggaaatggtagccgagtgacggtactttattagaaagccacggctaactacgtgccagcagccgcggtaatacgtaggtggcaagcgttatccggaattattgggcgtaaagagggagcaggcggcagcaagggtctgtggtgaaagcctgaagcttaacttcagtaagccatagaaaccaggcagctagagtgcaggagaggatcgtggaattccatgtgtagcggtgaaatgcgtagatatatggaggaacaccagtggcgaaggcgacgatctggcctgcaactgacgctcagtcccgaaagcgtggggagcaaataggattagataccctagtagtccacgccgtaaacgatgagtactaagtgttggatgtcaaagttcagtgctgcagttaacgcaataagtactccgcctgagtagtacgttcgcaagaatgaaactcaaaggaattgacgggggcccgcacaagcggtggagcatgtggtttaattcgaagcaacgcgaagaaccttaccaggtcttgacatactcataaaggctccagagatggagagatagctatatgagatacaggtggtgcatggttgtcgtcagctcgtgtcgtgagatgttgggttaagtcccgcaacgagcgcaacccttatcgttagttaccatcattaagttggggactctagcgagactgccagtgacaagctggaggaaggcggggatgacgtcaaatcatcatgccccttatgacctgggctacacacgtgctacaatggatggtgcagagggaagcgaagccgcgaggtgaagcaaaacccataaaaccattctcagttcggattgtagtctgcaactcgactacatgaagttggaatcgctagtaatcgcgaatcagcatgtcgcggtgaatacgttctcgggccttgtacacaccgcccgtcacaccacgagagttgataacacccgaagccggtggcctaaccgcaaggaa

SEQ ID NO: 184 - DNA, 1258 bp, Artificial Sequence
  STR00098 Collinsella_aerofaciens_strain_JCM_10188_16S_ribosomal_RNA
cataagaccacggtaccgcatggtacagtgggaaaaactccggtggtatgagatggacccgcgtctgattagctagttggtaaggtaacggcttaccaaggcgacgatcagtagccgacctgagagggtgaccggccacattgggactgagacacggcccaaactcctacgggaggcagcagtggggaatattgcacaatgggggaaaccctgatgcaacgacgccgcgtgaaggatgaagtatttcggtatgtaaacttctatcagcagggaagaaaatgacggtacctgactaagaagccccggctaactacgtgccagcagccgcggtaatacgtagggggcaagcgttatccggatttactgggtgtaaagggagcgtagacggttatgtaagtctgatgtgaaaacccggggctcaaccccgggactgcattggaaactatgtaactagagtgtcggagaggtaagtggaattcctagtgtagcggtgaaatgcgtagatattaggaggaacaccagtggcgaaggcggcttactggacgatgactgacgttgaggctcgaaagcgtggggagcaaacaggattagataccctggtagtccacgccgtaaacgatgcatactaggtgtcgggtggcaaagccattcggtgccgcagcaaacgcaataagtatgccacctggggagtacgttcgcaagaatgaaactcaaaggaattgacggggacccgcacaagcggtggagcatgtggtttaattcgaagcaacgcgaagaaccttacctgctcttgacatccccctgaccggcgcgtaatggtgcctttccttcgggacaggggagacaggtggtgcatggttgtcgtcagctcgtgtcgtgagatgttgggttaagtcccgcaacgagcgcaacccttatctttagtagccagcggttcggccgggcactctagagagactgccagggataacctggaggaaggtggggatgacgtcaaatcatcatgccccttatgagcagggctacacacgtgctacaatggcgtaaacaaagggaggcgaagccgcgaggtggagcaaatcccaaaaataacgtctcagttcggattgtagtctgcaactcgactacatgaagctggaatcgctagtaatcgcgaatcagaatgtcgcggtgaatacgttcccgggtcttgtacacaccgcccgtcacaccatgggagttggtaacgcccgaagtcagtgacccaaccgtaaggagg

SEQ ID NO: 185 - DNA, 1374 bp, Artificial Sequence
  STR00104 Collinsella_aerofaciens_strain_JCM_10188_16S_ribosomal_RNA
  misc_feature (908)..(908): n is a, c, g, or t
  misc_feature (914)..(916): n is a, c, g, or t
  misc_feature (918)..(920): n is a, c, g, or t
  misc_feature (933)..(936): n is a, c, g, or t
  misc_feature (939)..(939): n is a, c, g, or t
  misc_feature (958)..(958): n is a, c, g, or t
agttttcggatggaatcggtataacttagtggcggacgggtgagtaacgcgtgggaaacctgccctgtaccgggggataacacttagaaatgggtgctaataccgcataagcgcacggaaccgcatggttgtgtgtgaaaaactccggtggtacaggatggtcccgcgtctgattagccagttggcagggtaacggcctaccaaagcgacgatcagtagccggcctgagagggtgaacggccacattgggactgagacacggcccaaactcctacgggaggcagcagtggggaatattgcacaatgggggaaaccctgatgcagcgacgccgcgtgagtgaagaagtatttcggtatgtaaagctctatcagcagggaagaaaatgacggtacctgactaagaagccccggctaactacgtgccagcagccgcggtaatacgtagggggcaagcgttatccggatttactgggtgtaaagggagcgtagacggcatggcaagccagatgtgaaaacccagggctcaaccttgggattgcatttggaactgccaggctggagtgcaggagaggtaagcggaattcctagtgtagcggtgaaatgcgtagatattaggaggaacaccagtggcgaaggcggcttactggactgtaactgacgttgaggctcgaaagcgtggggagcaaacaggattagataccctggtagtccacgcggtaaacgatgattgctaggtgtaggtgggtatggacccatcggtgccgcagctaacgcaataagcaatccacctggggagtacgttcgcaagaatgaaactcaaaggaattgacggggacccgcacaagcggtggagcatgtggtttaattcgaagcaacgcgaagaaccttaccaagtcttgacatccccnctgacnnncnnnatatcttgtaaannnnganagggcttgcccttcgggancaagggagacaggtggtgcatggttgtcgtcagctcgtgtcgtgagatgttggggttaagtcccgcaacgagcgcaacccttattcttagtagccagcaggtaaagctgggcactctaaggagactgccggggataacccggaggaaggcggggatgacgtcaaatcatcatgccccttatgatttgggctacacacgtgctacaatggcgtaaacaaagggaagcgagacagtgatgtggagcaaatcccagaaataacgtctcagttcggattgtagtctgcaactcgactacatgaagctggaatcgctagtaatcgcgaatcagcatgtcgcggtgaatacgttcccgggtcttgtacacaccgcccgtcacaccatgggagttggaaatgcccgaagtctgtgacctaacc

SEQ ID NO: 186 - DNA, 1290 bp, Artificial Sequence
  STR00114 Collinsella_aerofaciens_strain_JCM_10188_16S_ribosomal_RNA
  misc_feature (579)..(579): n is a, c, g, or t
ctttactcggggatagcctttcgaaagaaagattaatacccgatggtataacatgacctcctggttttgttattaaagaatttcggtagaggatggggatgcgttccattaggcagttggcggggtaacggcccaccaaaccttcgatggataggggttctgagaggaaggtcccccacattggaactgagacacggtccaaactcctacgggaggcagcagtgaggaatattggtcaatgggcgagagcctgaaccagccaagtagcgtgaaggatgaccgccctatgggttgtaaacttcttttatatgggaataaagtttgccacgtgtggcattttgtatgtaccatatgaataaggatcggctaactccgtgccagcagccgcggtaatacggaggatccgagcgttatccggatttattgggtttaaagggagcgtaggtggacatgtaagtcagttgtgaaagtttgcggctcaaccgtaaaattgcagttgatactgcgtgtcttgagtacagtagaggtgggcggaattcgtggtgtagcggtgaaatgcttagatatcacgaagaactnccgattgcgaaggcagctcactggactgcaactgacactgatgctcgaaagtgtgggtatcaaacaggattagataccctggtagtccacacagtaaacgatgaatactcgctgtttgcgatatacagtaagcggccaagcgaaagcattaagtattccacctggggagtacgccggcaacggtgaaactcaaaggaattgacgggggcccgcacaagcggaggaacatgtggtttaattcgatgatacgcgaggaaccttacccgggcttaaattgcaaatgaatatgccggaaacggcatagccgcaaggcatttgtgaaggtgctgcatggttgtcgtcagctcgtgccgtgaggtgtcggcttaagtgccataacgagcgcaacccttatcttcagttactaacaggttatgctgaggactctggagagactgccgtcgtaagatgtgaggaaggtggggatgacgtcaaatcagcacggcccttacgtccggggctacacacgtgttacaatggggggtacagaaggccgctacacagcgatgtgatgccaatccctaaagcccctctcagttcggatcgaagtctgcaacccgacttcgtgaagctggattcgctagtaatcgcgcatcagccacggcgcggtgaatacgttcccgggccttgtacacaccgcccgtcaagccatgggagccgggggtacctgaa

SEQ ID NO: 187 - DNA, 1373 bp, Artificial Sequence
  STR00109 Collinsella_aerofaciens_strain_JCM_10188_16S_ribosomal_RNA
  misc_feature (47)..(47): n is a, c, g, or t
cggagcacccctgacggagttttcggacaacgaaagggaatgcttantggcggacgggtgagtaacgcgtgagtaacctgccttggagtggggaataacagccggaaacggctgctaataccgcatgatgtatctggatcgcatggttctggataccaaagatttatcgctctgagatggactcgcgtctgattagctagttggtgaggtaatggctcaccaaggcgacgatcagtagccggactgagaggttggccggccacattgggactgagacacggcccagactcctacgggaggcagcagtggggaatattgggcaatgggcgaaagcctgacccagcaacgccgcgtgaaggaagaaggccctcgggttgtaaacttcttttgtcagggacgaagcaagtgacggtacctgacgaataagccacggctaactacgtgccagcagccgcggtaatacgtaggtggcaagcgttatccggatttactgggtgtaaagggcgtgtaggcgggagtgcaagtcagatgtgaaaactatgggctcaacccatagcctgcatttgaaactgtacttcttgagtgatggagaggcaggcggaattccctgtgtagcggtgaaatgcgtagatatagggaggaacaccagtggcgaaggcggcctgctggacattaactgacgctgaggcgcgaaagcgtggggagcaaacaggattagataccctggtagtccacgccgtaaacgatggatactaggtgtggggggtctgaccccctccgtgccgcagttaacacaataagtatcccacctggggagtacgatcgcaaggttgaaactcaaaggaattgacgggggcccgcacaagcggtggagtatgtggtttaattcgaagcaacgcgaagaaccttaccaggacttgacatcctactaacgaagcagagatgcataaggtgccctttcggggaaagtagagacaggtggtgcatggttgtcgtcagctcgtgtcgtgagatgttgggttaagtcccgcaacgagcgcaacccttattgttagttgctacgcaagagcactctagcgagactgccgttgacaaaacggaggaaggtggggacgacgtcaaatcatcatgccccttatgtcctgggccacacacgtactacaatggcggtcaacagagggaagcaaagccgcgaggtggagcaaatccctaaaagccgtcccagttcggattgcaggctgaaactcgcctgtatgaagtcggaatcgctagtaatcgcggatcagcatgccgcggtgaatacgttcccgggccttgtacacaccgcccgtcacaccatgagagtcgggaacacccgaagtccgtagcctaac

SEQ ID NO: 188 - DNA, 1334 bp, Artificial Sequence
  STR00129 Collinsella_aerofaciens_strain_JCM_10188_16S_ribosomal_RNA
  misc_feature (455)..(455): n is a, c, g, or t
agcttgctccggccgatttagtggcggacgggtgagtaacgcgtgggtaacctgcctcatacagggggatagcagttggaaacgactggtaaaaccgcataagcgcacggtatcgcatgatacagtgtgaaaacactccggtggtatgagatggacccgcgtctgattagctagttggtgaggtaacggcccaccaaggcgacgatcagtagccggcctgagagggtgaacggccacattgggactgagacacggcccaaactcctacgggaggcagcagtggggaatattgcacaatgggggaaaccctgatgcagcgacgccgcgtgagtgaagaagtatttcggtatgtaaagctctatcagcagggaagataatgacggtacctgactaagaagcaccggctaaatacgtgccagcagccgcggtaatacgtatggtgcaagcgttatccnggatttactgggtgtaaagggtgcgtaggtggcaaggcaagtctgaagtgaaaatccggggctcaaccccggaactgctttggaaactgtttagctagagtacaggagaggtaagtggaattcctagtgtagcggtgaaatgcgtagatattaggaggaacaccagtggcgaaggcgacttactggactgctactgacactgaggcacgaaagcgtggggagcaaacaggattagataccctggtagtccacgccgtaaacgatgaatactaggtgttgggttccaaagggactcggtgccgtcgcaaacgcattaagtattccacctggggagtacgttcgcaagaatgaaactcaaaggaattgacggggacccgcacaagcggtggagcatgtggtttaattcgaagcaacgcgaaaaaccttaccaagtcttgacatcctgatgacggttccttaacccggaacttctcttcggagcatcagagacaggtggtgcatggttgtcgtcagctcgtgtcgtgagatgttgggttaagtcccgcaacgagcgcaacccctatttccagtagccagcagtaagatgggcactctggagagactgccggggataacccggaggaaggtggggatgacgtcaaatcatcatgccccttatgatttgggctacacacgtgctacaatggcagttacaaagagaagcaaacctgtgaaggcgagcaaacctcaaaaaggctgtctcagttcggattgtagtctgcaactcgactacatgaagctggaatcgctagtaatcgcagatcagcatgctgcggtgaatacgttcccgggtcttgtacacaccgcccgtcacaccatgggagtcaggtaacgcccgaa

SEQ ID NO: 189 - DNA, 1331 bp, Artificial Sequence
  STR00111 Collinsella_aerofaciens_strain_JCM_10188_16S_ribosomal_RNA
  misc_feature (893)..(893): n is a, c, g, or t
ctgagatgactgagtggcggacgggtgagtaacacgtggataacctgcctcacactgggggacaacagttagaaatgactgctaataccgcataagcgcacagtaccgcatggtacggtgtgaaaaactccggtggtgtgagatggatccgcgtctgattagccagttggcggggtaacggcccaccaaagcgacgatcagtagccgacctgagagggtgaccggccacattgggactgagacacggcccaaactcctacgggaggcagcagtggggaatattgcacaatgggcgaaagcctgatgcagcgacgccgcgtgagtgaagaagtatttcggtatgtaaagctctatcagcagggaagataatgacggtacctgactaagaagccccggctaactacgtgccagcagccgcggtaatacgtagggggcaagcgttatccggatttactgggtgtaaagggagcgtagacggcatggcaagtctgaagtgaaaacccagggctcaaccctgggactgctttggaaactgtcaagctagagtgcaggagaggtaagtggaattcctagtgtagcggtgaaatgcgtagatattaggaggaacaccagtggcgaaggcggcttactggactgtaactgacgttgaggctcgaaagcgtggggagcaaacaggattagataccctggtagtccacgccgtaaacgatgagtgctaggtgttggggggcaaagcccttcggtgccgtcgcaaacgcaataagcactccacctggggagtacgttcgcaagaatgaaactcaaaggaattgacggggacccgcacaagcggtggagcatgtggtttaattcgaagcaacgcgaagaaccttaccaagtcttgacatcctccntgaccggcgtgtaacggcgcctttccttcgggacaggggagacaggtggtgcatggttgtcgtcagctcgtgtcgtgagatgttgggttaagtcccgcaacgagcgcaacccttatccttagtagccagcattaagatgggcactctagggagactgccagggacaacctggaggaaggtggggatgacgtcaaatcatcatgccccttatgatttgggctacacacgtgctacaatggcgtaaacaaagggaagcgaccctgcgaaggtgagcaaatctcaaaaataacgtcccagttcggactgtagtctgcaacccgactacacgaagctggaatcgctagtaatcgcgaatcagaatgtcgcggtgaatacgttcccgggtcttgtacacaccgcccgtcacaccatgggagtcagcaacgcccgaagtcagtg

SEQ ID NO: 190 - DNA, 1348 bp, Artificial Sequence
  STR00108 Collinsella_aerofaciens_strain_JCM_10188_16S_ribosomal_RNA
  misc_feature (20)..(20): n is a, c, g, or t
tggaagttgaattgactgantggcggacgggtgagtaacgcgtgggtaacctgccttgtactgggggacaacagttagaaatgactgctaataccgcataagcgcacagtatcgcatgatacagtgtgaaaaactccggtggtacaagatggacccgcgtctgattagctagttggtaaggtaacggcttaccaaggcgacgatcagtagccgacctgagagggtgaccggccacattgggactgagacacggcccaaactcctacgggaggcagcagtggggaatattgcacaatgggcgaaagcctgatgcagcgacgccgcgtgagtgaagaagtatttcggtatgtaaagctctatcagcagggaagaaaatgacggtacctgactaagaagccccggctaactacgtgccagcagccgcggtaatacgtagggggcaagcgttatccggatttactgggtgtaaagggagcgtagacggtaaagcaagtctgaagtgaaagcccgcggctcaactgcgggactgctttggaaactgtttaactggagtgtcggagaggtaagtggaattcctagtgtagcggtgaaatgcgtagatattaggaggaacaccagtggcgaaggcgacttactggacgataactgacgttgaggctcgaaagcgtggggagcaaacaggattagataccctggtagtccacgccgtaaacgatgaatactaggtgttggggagcaaagctcttcggtgccgtcgcaaacgcagtaagtattccacctggggagtacgttcgcaagaatgaaactcaaaggaattgacggggacccgcacaagcggtggagcatgtggtttaattcgaagcaacgcgaagaaccttaccaggtcttgacatcgatccgacgggggagtaacgtcccctttcccttcggggcggagaagacaggtggtgcatggttgtcgtcagctcgtgtcgtgagatgttgggttaagtcccgcaacgagcgcaacccttattctaagtagccagcggttcggccgggaactcttgggagactgccagggataacctggaggaaggtggggatgacgtcaaatcatcatgccccttatgatctgggctacacacgtgctacaatggcgtaaacaaagagaagcaagaccgcgaggtggagcaaatctcaaaaataacgtctcagttcggactgcaggctgcaactcgcctgcacgaagctggaatcgctagtaatcgcgaatcagaatgtcgcggtgaatacgttcccgggtcttgtacacaccgcccgtcacaccatgggagtcagtaacgcccgaagtcagtgacccaaccgc

SEQ ID NO: 191 - DNA, 949 bp, Artificial Sequence
  STR00119 Collinsella_aerofaciens_strain_JCM_10188_16S_ribosomal_RNA
  misc_feature (12)..(18): n is a, c, g, or t
  misc_feature (600)..(600): n is a, c, g, or t
  misc_feature (937)..(937): n is a, c, g, or t
gagtaacacgtnnnnnnnctgcccatcagacggggacaacgattggaaacgatcgctaataccggataggacgaaagtttaaaggtgcttctggcaccgctgatggatgagcctgcggcgcattagctagttggtagggtaaaggcctaccaaggcgacgatgcgtagccgacctgagagggtgaacggccacactgggactgagacacggcccagactcctacgggaggcagcagtagggaatcttcggcaatgggcgaaagcctgaccgagcaacgccgcgtgaatgatgaaggccttcgggttgtaaaattctgttataagggaagaacgactttagtaggaaatggctagagtgtgacggtaccttatgagaaagccacggctaactacgtgccagcagccgcggtaatacgtaggtggcgagcgttatccggaattattgggcgtaaagagcgcgcaggtggttgattaagtctgattgtgaaagccccacggcttaacccgtggagggtcattggaaactggtcgacttgagtgcagaagagggaagtggaatttccatgtgtagcggtgaaatgcgtagagatatggaggaancaccagtggcgaaggcggcttcctggtctgtaactgacactgaggcgcgaaagccgtggggagcaaacaggattagataccctggtagtccacgccgtaaaacgatgagtgctaagtgttgggggtcgaacctcagtgctgaagttaacgcattaagcactccgcctggggagtacggtcgcaagactgaaactcaaaggaattgacggggacccgcacaagcggtggagcatgtggtttaattcgaagcaacgcgaagaaccttaccaggtcttgacataccattgaccgttctagagataggattttcccttcggggacaatggatacaggtggngcatgggttgtc

SEQ ID NO: 192 - DNA, 1318 bp, Artificial Sequence
  STR00113 Collinsella_aerofaciens_strain_JCM_10188_16S_ribosomal_RNA
  misc_feature (1150)..(1151): n is a, c, g, or t
aatccacctgtaacagggggataacccggagaaatccggactaataccccataatatgggcgctccgcatggagagcccattaaagagagcaattttggttacagacgagcatgcgctccattagccagttggcggggtaacggcccaccaaagcgacgatggataggggttctgagaggaaggtcccccacattggaactgagacacggtccaaactcctacgggaggcagcagtgaggaatattggtcaatggtcggcagactgaaccagccaagtcgcgtgagggaagacggccctacgggttgtaaacctcttttgtcggagagtaaagtacgctacgtgtagtgtattgcaagtatccgaagaaaaagcatcggctaactccgtgccagcagccgcggtaatacggaggatgcaagcgttatccggatttattgggtttaaagggtgcgtaggcggcacgccaagtcagcggtgaaatttccgggctcaacccggagtgtgccgttgaaactggcgagctagagtacacaagaggcaggcggaatgcgtggtgtagcggtgaaatgcatagatatcacgcagaaccccgattgcgaaggcagcctgctagggtgaaacagacgctgaggcacgaaagcgtgggtatcgaacaggattagataccctggtagtccacgcagtaaacgatgaatactaactgtttgcgatacaatgtaagcggtacagcgaaagcgttaagtattccacctggggagtacgccggcaacggtgaaactcaaaggaattgacgggggcccgcacaagcggaggaacatgtggtttaattcgatgatacgcgaggaaccttacccgggctcaaacgcagggggaatatatatgaaagtatatagctagcaatagtcacctgcgaggtgctgcatggttgtcgtcagctcgtgccgtgaggtgtcggcttaagtgccataacgagcgcaacccctatcgacagttactaacgggtcaagccgaggactctgtcgagactgccggcgcaagccgcgaggaaggtggggatgacgtcaaatcagcacggcccttacgtccggggcgacacacgtgttacaatggcaggtacagaaggcagccagtcagcaatgacgcgcganncccgaaaacctgtctcagttcggattggagtctgcaacccgactccatgaagctggattcgctagtaatcgcgcatcagccatggcgcggtgaatacgttcccgggccttgtacacaccgcccgtcaagccatggaagccgggagtacctgaagcatgcaaccgcaa

SEQ ID NO: 193 - DNA, 1370 bp, Artificial Sequence
  STR00097.4 Collinsella_aerofaciens_strain_JCM_10188_16S_ribosomal_RNA
  misc_feature (22)..(22): n is a, c, g, or t
gagcgagaagccattgactganacttcggtgagaaggatatggtggaaagcggcggacgggtgagtaacgcgtaggcaacctgccccttacagagggatagccattggaaacgatgattaaaacctcataacgcatcccccccacatggaggggatgccaaagattcatcggtaagggatgggcctgcgtctgattagcttgttggcggggtaacggcccaccaaggcgacgatcagtagccgacctgagagggtgatcggccacattggaactgagacacggtccaaactcctacgggaggcagcagtggggaatattgcacaatgggcgaaagcctgatgcagcaacgccgcgtgagggatgaaggccttcgggtcgtaaacctctgtccttggggaagaaacaaatgacggtacccatggaggaagccccggctaactacgtgccagcagccgcggtaatacgtagggggcgagcgttatccggaattattgggcgtaaagagtgcgtaggtggttacctaagcgcagggtctaaggcaatggctcaaccattgttcgccctgcgaactgggctacttgagtgcaggagaggaaagcggaattcctagtgtagcggtgaaatgcgtagatattaggaggaacaccagtggcgaaggcggctttctggactgttactgacactgaggcacgaaagcgtggggagcaaacaggattagataccctggtagtccacgccgtaaacgatgagcactaggtgtcggggccgcaaggcttcggtgccgcagttaacgcattaagtgctccgcctggggagtacgcacgcaagtgtgaaactcaaaggaattgacggggacccgcacaagcagcggagcatgtggtttaattcgaagcaacgcgaagaaccttaccaggacttgacatcccactgacagatccctaaccggatccttcttcggacagtggagacaggtggtgcatggttgtcgtcagctcgtgtcgtgagatgttgggttaagtcccgcaacgagcgcaacccttgccattagttgccatcattcagttgggcactctaatgggactgccggggacaactcggaggaaggtggggatgacgtcaaatcatcatgccccttatgttctgggctacacacgtgctacaatggccggtacagcaagaagcaaaaccgcgaggtggagcaaatctcaaaaaccggtcccagttcggactgcaggctgaaacccgcctgcacgaagccggagttgctagtaatcgtggatcagaatgccacggtgaatgcgttcccgggtcttgtacacaccgcccgtcacaccatggaagttgggggtgcccgaagccggcagggaaa

SEQ ID NO: 194 - DNA, 1372 bp, Artificial Sequence
  STR00112 Collinsella_aerofaciens_strain_JCM_10188_16S_ribosomal_RNA
tcgagcgaaccacttcggtggtgagcggcgaacgggtgagtaacacgtaggttatctgcccatcagacggggacaacgattggaaacgatcgctaataccggataggacgaaagtttaaaggtgcttcggcaccactgatggatgagcctgcggcgcattagctagttggtagggtaaaggcctaccaaggcgacgatgcgtagccgacctgagagggtgaacggccacactgggactgagacacggcccagactcctacgggaggcagcagtagggaatcttcggcaatgggcgaaagcctgaccgagcaacgccgcgtgaatgatgaaggccttcgggttgtaaaattctgttataagggaagaatggctctagtaggaaatggctagagtgtgacggtaccttatgagaaagccacggctaactacgtgccagcagccgcggtaatacgtaggtggcgagcgttatccgggaattattgggcgtaaagagcgcgcaggtggttgattaagtctgatgtgaaagcccacggcttaaccgtggagggtcattggaaactggtcaacttgagtgcagaagagggaagtggaattccatgtgtagcggtgaaatgcgtagagatatggaggaacaccagtggcgaaggcggcttcctggtctgtaactgacactgaggcgcgaaagcgtggggagcaaacaggattagataccctggtagtccacgccgtaaacgatgagtgctaagtgttgggggtcgaacctcagtgctgaagttaacgcattaagcactccgcctggggagtacggtcgcaagactgaaactcaaaggaattgacggggacccgcacaagcggtggagcatgtggtttaattcgaagcaacgcgaagaaccttaccaggtcttgacataccagtgaccgtcctagagataggattttcccttcggggacaatggatacaggtggtgcatggttgtcgtcagctcgtgtcgtgagatgttgggttaagtcccgcaacgagcgcaacccctgtcgttagttgccagcattcagttggggactctaacgagactgccagtgacaaactggaggaaggtggggatgacgtcaaatcatcatgccccttatgacctgggctacacacgtgctacaatggttggtacaaagagaagcgaagcggtgacgtggagcaaacctcataaagccaatctcagttcggattgtaggctgcaactcgcctacatgaagttggaatcgctagtaatcgcgaatcagcatgtcgcggtgaatacgttcccgggtcttgtacacaccgcccgtcacaccacgagagtttacaacacccgaagtcagtggcctaaccgcaaggagg

SEQ ID NO: 195 - DNA, 1327 bp, Artificial Sequence
  STR00118 Collinsella_aerofaciens_strain_JCM_10188_16S_ribosomal_RNA
  misc_feature (461)..(461): n is a, c, g, or t
tcgggggaataagtgattggaaagtggcgaacgggtgagtaacgcgtgggtaacctgccctatggaaaggaatagcctcgggaaactgggagtaaagccttatattatggagagatcgcatggtcatttcatgaaaactccggtgccataggatggacccgcgtcccattagctagttggtgagataacagcccaccaaggcgacgatgggtaaccggtctgagagggcgaacggtcacactggaactgagacacggtccagactcctacgggaggcagcagtggggaatattgcgcaatgggggcaaccctgacgcagcaataccgcgtgagtgaagaaggttttcggatcgtaaagctctgttattggggaagaaaacatgacggtacccaatgaggaagtcccggctaactacgtgccagcagccgcggtaatacgtaggggacaagcgttgtccggnaatgactgggcgtaaagggcgcgtaggcggtctgataagtcagatgtgaaaggtaccggctcaaccggtgacgtgcatttgaaactgtcagacttgagtattggagaggcaagtggaattcctagtgtagcggtgaaatgcgtagatattaggaggaacaccagtggcgaaggcggcttgctggacaaatactgacgctgaggtgcgaaagcgtggggagcgaacaggattagataccctggtagtccacgccgtaaacgatgaatgctaggtgttggggaaactcagtgccgcagttaacacaataagcattccgcctggggagtacgaccgcaaggttgaaactcaaaggaattgacggggacccgcacaagcagcggagcatgtggtttaattcgaagcaacgcgaagaaccttaccaggtcttgacatcctctgacaatcccagagatgggacgtttccttcgggaacagagagacaggtggtgcatggttgtcgtcagctcgtgtcgtgagatgttgggttaagtcccgcaacgagcgcaacccctgcctttagttgccagcattgagttgggcactctagagggactgccgtagacaatacggaggaaggtggggatgacgtcaaatcatcatgccccttatgacctgggctacacacgtgctacaatggtctgaacagagggccgcgaaaccgcgaggtgaagcaaatcccttaaaacagatcccagttcggattgcaggctgcaactcgcctgcatgaagttggagttgctagtaatcgcggatcagaatgccgcggtgaatgcgttcccgggtcttgtacacaccgcccgtcacaccacgagagttggcaacacccg

SEQ ID NO: 196 - DNA, 1244 bp, Artificial Sequence
  STR00122 Collinsella_aerofaciens_strain_JCM_10188_16S_ribosomal_RNA
  misc_feature (17)..(24): n is a, c, g, or t
  misc_feature (27)..(28): n is a, c, g, or t
  misc_feature (65)..(65): n is a, c, g, or t
  misc_feature (596)..(596): n is a, c, g, or t
  misc_feature (634)..(634): n is a, c, g, or t
  misc_feature (756)..(756): n is a, c, g, or t
  misc_feature (765)..(765): n is a, c, g, or t
  misc_feature (782)..(782): n is a, c, g, or t
  misc_feature (907)..(907): n is a, c, g, or t
  misc_feature (1036)..(1036): n is a, c, g, or t
  misc_feature (1058)..(1058): n is a, c, g, or t
  misc_feature (1078)..(1078): n is a, c, g, or t
  misc_feature (1098)..(1098): n is a, c, g, or t
  misc_feature (1117)..(1117): n is a, c, g, or t
tggcgaccggcgcacgnnnnnnnnacnngtatccaacctgccgattattccgggatagcctttcnaaagaaagattaatactggatagcataacgagaaggcatcttcttgttattaaagaatttcgataatcgatggggatgcgttccattagtttgttggcggggtaacggcccaccaagacatcgatggataggggttctgagaggaaggtcccccacattggaactgagacacggtccaaactcctacgggaggcagcagtgaggaatattggtcaatggacgagagtctgaaccagccaagtagcgtgaaggatgactgccctatgggttgtaaacttcttttatatgggaataaagtgcagtatgtatactgttttgtatgtaccatacgaataaggatcggctaactccgtgccagcagccgcggtaatacggaggatccgagcgttatccggatttattgggtttaaagggagcgtaggcggattattaagtcagttgtgaaagtttgcggctcaaccgtaaaattgcagttgatactggtagtcttgagtgcagcagaggtaggcggaattcgtggtgtagcggtgnaaatgctttagatatcacgaagaactccgattgcgaanggcagcttactggactgtaactgacgctgatgctcgaaagtgtgggtatcaaacaggattagatacccctggtagtccacacagtaaacgatgaaatactcgctgttttgcgatatacagcnaagcggccnaagcgaaaagcattaangtattccacctggggagtacgccggcaacggtgaaactcaaaggaaattgacgggggcccgcacaaagcggaggaacatgtggtttaattcgatgatacgcgaggaaccttacccgggccttaantgcaactgacggatttggaaacagatcttccttcgggcagttgtgaaggtgctgcatggttgtcgtcagctcgtgccgtgaggtgtcggcttaagtgccataacgagcgcaacccttatctttagttantaacaggtcatgctgaggactntagagagactgccgtcgtangatgtgaggaaggtggggangacgtcaaatcagcacggnccttacgtccggggctacacacgtgttacaatggggggtacagaaggcagctacacagcgatgtgatgctaatcccaaaatcctctctcagttcggattggagtctgcaacccgactccatgaagct

SEQ ID NO: 197 - DNA, 1359 bp, Artificial Sequence
  STR00105.6 Collinsella_aerofaciens_strain_JCM_10188_16S_ribosomal_RNA
  misc_feature (406)..(406): n is a, c, g, or t
tcggatgaagacttttgtgactgagcggcggacgggtgagtaacgcgtgggtaacctgcctcatacagggggataacagttagaaatgactgctaataccgcataagaccacggtaccgcatggtacagtggtaaaaactccggtggtatgagatggacccgcgtctgattaggtagttggtggggtaacggcctaccaagccgacgatcagtagccgacctgagagggtgaccggccacattgggactgagacacggcccagactcctacgggaggcagcagtggggaatattgcacaatggaggaaactctgatgcagcgacgccgcgtgaaggatgaagtatttcggtatgtaaacttctatcagcagggaagaaaatgacggtacctgactaagaagccccnggctaactacgtgccagcagccgcggtaatacgtagggggcaagcgttatccggatttactgggtgtaaagggagcgtagacggcacggcaagccagatgtgaaagcccggggctcaaccccgggactgcatttggaactgctgagctagagtgtcggagaggcaagtggaattcctagtgtagcggtgaaatgcgtagatattaggaggaacaccagtggcgaaggcggcttgctggacgatgactgacgttgaggctcgaaagcgtggggagcaaacaggattagataccctggtagtccacgccgtaaacgatgactgctaggtgtcgggtggcaaagccattcggtgccgcagctaacgcaataagcagtccacctggggagtacgttcgcaagaatgaaactcaaaggaattgacggggacccgcacaagcggtggagcatgtggtttaattcgaagcaacgcgaagaaccttacctgatcttgacatcccgatgaccgcttcgtaatggaagcttttcttcggaacatcggtgacaggtggtgcatggttgtcgtcagctcgtgtcgtgagatgttgggttaagtcccgcaacgagcgcaacccctatcttcagtagccagcaggttaagctgggcactctggagagactgccagggataacctggaggaaggtggggatgacgtcaaatcatcatgccccttatgaccagggctacacacgtgctacaatggcgtaaacaaagagaagcgaactcgcgagggtaagcaaatctcaaaaataacgtctcagttcggattgtagtctgcaactcgactacatgaagctggaatcgctagtaatcgcagatcagaatgctgcggtgaatacgttcccgggtcttgtacacaccgcccgtcacaccatgggagtcagtaacgcccgaagtcagtgacccaaccgtaagga

SEQ ID NO: 198 - DNA, 1258 bp, Artificial Sequence
  STR00094 Collinsella_aerofaciens_strain_JCM_10188_16S_ribosomal_RNA
aaaggtacgctaatacgagatgatatatttttatcgcatggtagaaatatcaaagctccggcggtataggatggacccgcgtctgattagctagttggtaaggtaacggcttaccaaggcgacgatcagtagccgacctgagagggtgatcggccacattggaactgagacacggtccaaactcctacgggaggcagcagtggggaatattgcacaatgggcgaaagcctgatgcagcaacgccgcgtgagcgatgaaggccttcgggtcgtaaagctctgtcctcaaggaagataatgacggtacttgaggaggaagccccggctaactacgtgccagcagccgcggtaatacgtagggggctagcgttatccggaattactgggcgtaaagggtgcgtaggtggtttcttaagtcagaggtgaaaggctacggctcaaccgtagtaagcctttgaaactgggaaacttgagtgcaggagaggagagtagaattcctagtgtagcggtgaaatgcgtagatattaggaggaataccagttgcgaaggcggctctctggactgtaactgacactgaggcacgaaagcgtggggagcaaacaggattagataccctggtagtccacgccgtaaacgatgagtactagctgtcggaggttacccccttcggtggcgcagctaacgcattaagtactccgcctgggaagtacgctcgcaagagtgaaactcaaaggaattgacggggacccgcacaagtagcggagcatgtggtttaattcgaagcaacgcgaagaaccttacctaagcttgacatccttttgacctctccctaatcggagatttcccttcggggacagaagtgacaggtggtgcatggttgtcgtcagctcgtgtcgtgagatgttgggttaagtcccgcaacgagcgcaacccttgcctttagttgccagcattaagttgggcactctagagggactgccagggataacctggaggaaggtggggatgacgtcaaatcatcatgccccttatgcttagggctacacacgtgctacaatgggtggtacagagggcagccaagtcgtgaggcggagctaatcccttaaagccattctcagttcggattgtaggctgaaactcgcctacatgaagctggagttactagtaatcgcagatcagaatgctgcggtgaatgcgttcccgggtcttgtacacaccgcccgtcacaccatgggagttgggggcgcccgaagccggtt

SEQ ID NO: 199 - DNA, 1339 bp, Artificial Sequence
  STR00106 Collinsella_aerofaciens_strain_JCM_10188_16S_ribosomal_RNA
tcttcggagatgaaggcggctgcgactgagtggcggacgggtgagtaacgcgtgggcaacctgccttgcactgggggataacagccagaaatggctgctaataccgcataagaccgaagcgccgcatggcgctgcggccaaagccccggcggtgcaagatgggcccgcgtctgattaggtagttggcggggtaacggcccaccaagccgacgatcagtagccgacctgagagggtgaccggccacattgggactgagacacggcccagactcctacgggaggcagcagtggggaatattgcacaatgggggaaaccctgatgcagcgacgccgcgtgaaggatgaagtatttcggtatgtaaacttctatcagcagggaagaagatgacggtacctgactaagaagccccggctaactacgtgccagcagccgcggtaatacgtagggggcaagcgttatccggatttactgggtgtaaagggagcgtagacggcgatgcaagccagatgtgaaagcccggggctcaaccccgggactgcatttggaactgcgtggctggagtgtcggagaggcaggcggaattcctagtgtagcggtgaaatgcgtagatattaggaggaacaccagtggcgaaggcggcctgctggacgatgactgacgttgaggctcgaaagcgtggggagcaaacaggattagataccctggtagtccacgccgtaaacgatgactactaggtgtcgggtggcaaggccattcggtgccgcagcaaacgcaataagtagtccacctggggagtacgttcgcaagaatgaaactcaaaggaattgacggggacccgcacaagcggtggagcatgtggtttaattcgaagcaacgcgaagaaccttacctgatcttgacatcccgatgccaaagcgcgtaacgcgctctttcttcggaacatcggtgacaggtggtgcatggttgtcgtcagctcgtgtcgtgagatgttgggttaagtcccgcaacgagcgcaacccctatcttcagtagccagcatttcggatgggcactctggagagactgccagggacaacctggaggaaggtggggatgacgtcaaatcatcatgccccttatgaccagggctacacacgtgctacaatggcgtaaacaaagggaggcgaacccgcgagggtgggcaaatcccaaaaataacgtctcagttcggattgtagtctgcaactcgactacatgaagctggaatcgctagtaatcgcgaatcagaatgtcgcggtgaatacgttcccgggtcttgtacacaccgcccgtcacaccatgggagtcagtaacgcccga

SEQ ID NO: 200 - DNA, 1360 bp, Artificial Sequence
  STR00084 Collinsella_aerofaciens_strain_JCM_10188_16S_ribosomal_RNA
  misc_feature (16)..(16): n is a, c, g, or t
gtcttcggatggaagngttggatacttagcggcggacgggtgagtaacgcgtgggcaacctgccccataccgggggataacagccagaaatggctgctaataccgcataagcgcacagcgcctcatggcgcggtgtgaaaaactccggtggtatgggatgggcccgcgtctgattaggtagttggcggggtaacggcccaccaagccgacgatcagtagccgacctgagagggtgaccggccacattgggactgagacacggcccaaactcctacgggaggcagcagtggggaatattgcacaatgggggaaaccctgatgcagcgacgccgcgtgagcgaagaagtatttcggtatgtaaagctctatcagcagggaagaaaaatgacggtacctgactaagaagccccggctaactacgtgccagcagccgcggtaatacgtagggggcaagcgttatccggatttactgggtgtaaagggagcgtagacggccaggcaagtctgatgtgaaaggcaggggctcaacccctggactgcattggaaactgtcaggctggagtgccggagaggtaagcggaattcctagtgtagcggtgaaatgcgtagatattaggaggaacaccagtggcgaaggcggcttactggacggtaactgacgttgatgctcgaaagcgtggggagcaaacaggattagataccctggtagtccacgccgtaaacgatgaatactaggtgtcggggggcaaagcccttcggtgccgccgcaaacgcattaagtattccacctggggagtacgttcgcaagaatgaaactcaaaggaattgacggggacccgcacaagcggtggagcatgtggtttaatttcgaagcaacgcgaagaaccttaccaagccttgacatcccattgaagccagagtaacgtctgacggccttcgggacaatggagacaggtggtgcatggttgtcgtcagctcgtgtcgtgagatgttgggttaagtcccgcaacgagcgcaacccttatcttcagtagccagcacgcgatggtgggcactctggagagactgccagggacaacctggaggaaggtggggatgacgtcaaatcatcatgccccttatggcttgggctacacacgtgctacaatggcgtaaacagagggaagcagccctgcgaaggtgagcgaatcccaaaaataacgtctcagttcggattgtagtctgcaactcgactacatgaagctggaatcgctagtaatcgcgaatcagaatgtcgcggtgaatacgttcccgggtcttgtacacaccgcccgtcacaccatgggagtcagtaacgcccgaagtcagtgacctaaccgaa

SEQ ID NO: 201 - DNA, 1363 bp, Artificial Sequence
  STR00115 Collinsella_aerofaciens_strain_JCM_10188_16S_ribosomal_RNA
tcttcggattgaagtctttgtgactgagcggcggacgggtgagtaacgcgtgggtaacctgcctcatacagggggataacagttagaaatgactgctaataccgcataagcgcacaggaccgcatggtctggtgtgaaaaactccggtggtatgagatggacccgcgtctgattagctagttggaggggtaacggcccaccaaggcgacgatcagtagccggcctgagagggtgaacggccacattgggactgagacacggcccagactcctacgggaggcagcagtggggaatattgcacaatgggggaaaccctgatgcagcgacgccgcgtgaaggaagaagtatctcggtatgtaaacttctatcagcagggaagaaaatgacggtacctgactaagaagccccggctaactacgtgccagcagccgcggtaatacgtagggggcaagcgttatccggatttactgggtgtaaagggagcgtagacggaagagcaagtctgatgtgaaaggctggggcttaaccccaggactgcattggaaactgttgttctagagtgccggagaggtaagcggaattcctagtgtagcggtgaaatgcgtagatattaggaggaacaccagtggcgaaggcggcttactggacggtaactgacgttgaggctcgaaagcgtggggagcaaacaggattagataccctggtagtccacgccgtaaacgatgaatactaggtgtcgggtggcaaagccattcggtgccgcagcaaacgcaataagtattccacctggggagtacgttcgcaagaatgaaactcaaaggaattgacggggacccgcacaagcggtggagcatgtggtttaattcgaagcaacgcgaagaaccttaccaagtcttgacatccctctgaccgtcccgtaacggggacttcccttcggggcagaggagacaggtggtgcatggttgtcgtcagctcgtgtcgtgagatgttgggttaagtcccgcaacgagcgcaacccttatccttagtagccagcacatgatggtgggcactctagggagactgccggggataacccggaggaaggcggggacgacgtcaaatcatcatgccccttatgatttgggctacacacgtgctacaatggcgtaaacaaagggaagcgagacagcgatgttgagcgaatcccaaaaataacgtcccagttcggactgcagtctgcaactcgactgcacgaagctggaatcgctagtaatcgcggatcagaatgccgcggtgaatacgttcccgggtcttgtacacaccgcccgtcacaccatgggagtcagtaacgcccgaagtcagtgacctaaccgaaaggaag

SEQ ID NO: 202 - DNA, 1374 bp, Artificial Sequence
  STR00117 Collinsella_aerofaciens_strain_JCM_10188_16S_ribosomal_RNA
  misc_feature (13)..(13): n is a, c, g, or t
  misc_feature (17)..(19): n is a, c, g, or t
  misc_feature (45)..(45): n is a, c, g, or t
  misc_feature (488)..(488): n is a, c, g, or t
tcgagcgaagcancttnnncggatttcttcggattgaagtttttngtgactcgagcggcggacgggtgagtaacgcgtgggtaacctgcctcatacagggggataacagttagaaatggctgctaataccgcataagcgcacaggaccgcatggtctggtgtgaaaaactccggtggtatgagatggacccgcgtctgattagctagttggaggggtaacggcccaccaaggcgacgatcagtagccggcctgagagggtgaacggccacattgggactgagacacggcccagactcctacgggaggcagcagtggggaatattgcacaatgggggaaaccctgatgcagcgacgccgcgtgaaggaagaagtatctcggtatgtaaacttctatcagcagggaagaaaatgacggtacctgactaagaagccccggctaactacgtgccagcagccgcggtaatacgtagggggcaagcgttatccnggatttactgggtgtaaagggagcgtagacggaagagcaagtctgatgtgaaaggctggggcttaaccccaggactgcattggaaactgtttttctagagtgccggagaggtaagcggaattcctagtgtagcggtgaaatgcgtagatattaggaggaacaccagtggcgaaggcggcttactggacggtaactgacgttgaggctcgaaagcgtggggagcaaacaggattagataccctggtagtccacgccgtaaacgatgaatactaggtgtcgggtggcaaagccattcggtgccgcagcaaacgcaataagtattccacctggggagtacgttcgcaagaatgaaactcaaaggaattgacggggacccgcacaagcggtggagcatgtggtttaattcgaagcaacgcgaagaaccttaccaagtcttgacatccctctgaccggcccgtaacggggccttcccttcggggcagaggagacaggtggtgcatggttgtcgtcagctcgtgtcgtgagatgttgggttaagtcccgcaacgagcgcaacccctatccttagtagccagcaggtgaagctgggcactctagggagactgccggggataacccggaggaaggcggggacgacgtcaaatcatcatgccccttatgatttgggctacacacgtgctacaatggcgtaaacaaagggaagcgagacagcgatgttgagcaaatcccaaaaataacgtcccagttcggactgcagtctgcaactcgactgcacgaagctggaatcgctagtaatcgcgaatcagaatgtcgcggtgaatacgttcccgggtcttgtacacaccgcccgtcacaccatgggagtcagtaacgcccgaagtcagtg

SEQ ID NO: 203 - DNA, 1366 bp, Artificial Sequence
  STR00138 Collinsella_aerofaciens_strain_JCM_10188_16S_ribosomal_RNA
  misc_feature (16)..(16): n is a, c, g, or t
  misc_feature (41)..(41): n is a, c, g, or t
  misc_feature (1338)..(1339): n is a, c, g, or t
ggtttgctcagtattngagtattctaagactagaatgttcnattctgagcaaaaccaagcggcggacgggtgagtaacgcgtgggtaacctgccctatacacatggataacatactgaaaagtttactaatacatgataatatatatttgcggcatcgcagatatatcaaagtgttagcggtataggatggacccgcgtctgattagctagttggtgagataactgcccaccaaggcgacgatcagtagccgacctgagagggtgatcggccacattggaactgagacacggtccaaactcctacgggaggcagcagtggggaatattgcacaatgggcgaaagcctgatgcagcaacgccgcgtgaacgatgaaggtcttcggatcgtaaagttctgttgcaggggaagataatgacggtaccctgtgaggaagccccggctaactacgtgccagcagccgcggtaatacgtagggggctagcgttatccggatttactgggcgtaaagggtgcgtaggtggtcctttcaagtcggtggttaaaggctacggctcaaccgtagtaagccgccgaaactggaggacttgagtgcaggagaggaaagtggaattcccagtgtagcggtgaaatgcgtagatattgggaggaacaccagtagcgaaggcggctttctggactgcaactgacactgaggcacgaaagcgtgggtagcaaacaggattagataccctggtagtccacgctgtaaacgatgagtactaggtgtcgggggttacccccctcggtgccgcagctaacgcattaagtactccgcctggggagtacgcacgcaagtgtgaaactcaaaggaattgacggggacccgcacaagtagcggagcatgtggtttaattcgaagcaacgcgaagaaccttacctaagcttgacatccctcggacaggtgtttaatcacacccttccttcgggactgaggtgacaggtggtgcatggttgtcgtcagctcgtgtcgtgagatgttgggttaagtcccgcaacgagcgcaacccttgtctttagttgccagcattcagttgggcactctagagagactgccagggataacctggaggaaggtggggatgacgtcaaatcatcatgccccttatgcttagggctacacacgtgctacaatgggtggtacagagggttgccaaaccgtgaggtggagccaatcccttaaagccattctcagttcggattgtaggctgaaactcgcctacatgaagctggagttactagtaatcgcagatcagaatgctgcggtgaatgcgttcccgggtcttgtacacaccgcccnncacaccacgggagtcggaaacacccga

SEQ ID NO: 204 - DNA, 1360 bp, Artificial Sequence
  STR00032 Collinsella_aerofaciens_strain_JCM_10188_16S_ribosomal_RNA
  misc_feature (964)..(964): n is a, c, g, or t
  misc_feature (998)..(998): n is a, c, g, or t
ttgagagagcttgctttttcaagtttagtggcgaacgggtgagtaacgcgtgagtaacctgccctggagtgggggacaacagttggaaacgactgctaataccgcataagcccacggcaccgcatggtgctgagggaaaaggatttattcgcttcaggatggactcgcgtccaattagctagttggtgaggtaacggcccaccaaggcgacgattggtagccggactgagaggttgaacggccacattgggactgagacacggcccagactcctacgggaggcagcagtgggggatattgcacaatgggggaaaccctgatgcagcgacgccgcgtggaggaagaaggttttcggattgtaaactcctgtcgtacgggacgataatgacggtaccgtacaagaaagccacggctaactacgtgccagcagccgcggtaaaacgtaggtggcaagcgttgtccggaattactgggtgtaaagggagcgcaggcggaccggcaagttggaagtgaaatctatgggctcaacccataaattgctttcaaaactgctggccttgagtagtgcagaggtaggcggaattcccggtgtagcggtggaatgcgtagatatcgggaggaacaccagtggcgaaggcggcctactgggcaccaactgacgctgaggctcgaaagcatgggtagcaaacaggattagataccctggtagtccatgccgtaaacgatgattactaggtgttggaggattgaccccttcagtgccgcagttaacacaataagtaatccacctggggagtacgaccgcaaggttgaaactcaaaggaattgacgggggcccgcacaagcagtggagtatgtggtttaattcgaagcaacgcgaagaaccttaccaggtcttgacatccgatgcatagtgcagagatgcatgaagtccttcgggacatcgagacaggtggtgcatggnttgtcgtcagctcgtgtcgtgagatgttgggttnaagtcccgcaacgagcgcaacccttattgccagttactacgcaagaggactctggcgagactgccgttgacaaaacggaggaaggtggggatgacgtcaaatcatcatgccctttatgacctgggctacacacgtactacaatggcgtttaacaaagagaagcaataccgcgaggtggagcaaaactcaaaaacaacgtctcagttcagattgcaggctgcaactcgcctgcatgaagtcggaattgctagtaatcgcggatcagcatgccgcggtgaatacgttcccgggccttgtacacaccgcccgtcacaccatgagagccggggggacccgaagtccgtagtctaaccgcaaggagg

SEQ ID NO: 205 - DNA, 1367 bp, Artificial Sequence
  STR00081.3 Collinsella_aerofaciens_strain_JCM_10188_16S_ribosomal_RNA
tacgttttgaagttttcggatggatgaatgtaagcttagtggcggacgggtgagtaacacgtgagcaacctgcctttcagagggggataacagccggaaacggctgctaataccgcatgatgttgcgggggcacatgcccctgcaaccaaaggagcaatccgctgaaagatgggctcgcgtccgattagccagttggcggggtaacggcccaccaaagcgacgatcggtagccggactgagaggttgaacggccacattgggactgagacacggcccagactcctacgggaggcagcagtgggggatattgcacaatgggcgaaagcctgatgcagcgacgccgcgtgagggaagacggtcttcggattgtaaacctctgtctttggggaagaaaatgacggtacccaaagaggaagctccggctaactacgtgccagcagccgcggtaatacgtagggagcaagcgttgtccggaattactgggtgtaaagggagcgtaggcgggatggcaagtagaatgttaaatccatcggctcaaccggtggctgcgttctaaactgccgttcttgagtgaagtagaggcaggcggaattcctagtgtagcggtgaaatgcgtagatattaggaggaacaccagtggcgaaggcggcctgctgggctttaactgacgctgaggctcgaaagcgtggggagcaaacaggattagataccctggtagtccacgccgtaaacgatgattactaggtgtggggggactgaccccttccgtgccgcagttaacacaataagtaatccacctggggagtacggccgcaaggttgaaactcaaaggaattgacgggggcccgcacaagcagtggagtatgtggtttaattcgaagcaacgcgaagaaccttaccaggtcttgacatcggatgcatagcctagagataggtgaagcccttcggggcatccagacaggtggtgcatggttgtcgtcagctcgtgtcgtgagatgttgggttaagtcccgcaacgagcgcaacccttattattagttgctacgcaagagcactctaatgagactgccgttgacaaaacggaggaaggtggggatgacgtcaaatcatcatgccccttatgacctgggctacacacgtactacaatggcactaaaacagagggcggcgacaccgcgaggtgaagcgaatcccgaaaaagtgtctcagttcagattgcaggctgcaacccgcctgcatgaagtcggaattgctagtaatcgcggatcagcatgccgcggtgaatacgttcccgggccttgtacacaccgcccgtcacaccatgggagtcggtaacacccgaagccagtagcctaaccgcaagggg

SEQ ID NO: 206 - DNA, 1323 bp, Artificial Sequence
  STR00033 Collinsella_aerofaciens_strain_JCM_10188_16S_ribosomal_RNA
tgcccatcggcctgggataacagttggaaacgactgctaataccggataggtgataaagaggcatctctcgatcattaaagttgggatacaacacggatggatgagcttatggcgtattatctagtaggtgaggtaacggctcacctaggcgatgatacgtagccgacctgagagggtgaccggccacattgggactgagacacggcccaaactcctacgggaggcagcagtagggaattttcggcaatgggcgaaagcctgaccgagcaacgccgcgtgagtgaagaaggccttcgggttgtaaagctctgttgtgaaggaagaacggctcatacagggaatggtatgggagtgacggtactttaccagaaagccacggctaactacgtgccagcagccgcggtaatacgtaggtggcgagcgttatccgggaattattgggcgtaaagggtgcgcaggcggtttgttaagtttaaggtgaaagcgtggggcttaaccccatatagccttagaaactgacagactagagtacaggagagggcaatggaattccatgtgtagcggtaaaatgcgtagatatatggaggaacaccagtggcgaaggcggttgcctggcctgtaactgacgctcatgcacgaaagcgtggggagcaaataggattagataccctagtagtccacgccgtaaacgatgagaactaagtgttggggaaactcagtgctgcagttaacgcaataagttctccgcctggggagtatgcacgcaagtgtgaaactcaaaggaattgacgggggcccgcacaagcggtggagtatgtggtttaattcgacgcaacgcgaagaaccttaccaggtcttgacatcccctgcaaagacatagagatatgttggaggttatcagggagacaggtggtgcatggttgtcgtcagctcgtgtcgtgagatgttgggttaagtcccgcaacgagcgcaacccttgtctttagttgctaacattaagttgaggactctagagagactgccggtgacaaaccggaggaaggtggggatgacgtcaaatcatcatgccccttatgacctgggctacacacgtactacaatggcggatacaacgagaagcaagacagtgatgtggagcaaaactcagaaagtccgtctcagttcggattgaagtctgcaacccgacttcatgaagccggaatcgctagtaatcgcggatcagcatgccgcggtgaatacgttctcgggccttgtacacaccgcccgtcaaaccatgagagttggcaatacccgaagccggtggcctaacctcgcaagaggag

SEQ ID NO: 207 - DNA, 1338 bp, Artificial Sequence
  STR00142 Collinsella_aerofaciens_strain_JCM_10188_16S_ribosomal_RNA
  misc_feature (23)..(24): n is a, c, g, or t
ataattgatccttcgggtgaatnntataagcggacagtggcgaacgggtgagtaacgcgtaggtaaccaacctcatgcagggggatagcccagggaaacttggattaaacccgcataagaccacagcaccgcatggtgcaggggtaaaaactccggtggcatgagacggacctgcgtcttattaggtagttggtgaggtaacggctcaccaagccaacgatgagtagccgacctgagagggtgatcggccacattgggactgagacacggcccagactcctacgggaggcagcagtggggaatattgcgcaatgggggaaaccctgacgcagcaacgccgcgtgagcgatgaaggttttcggatcgtaaagctctgtctttggggaagataatgacggtacccaaggaggaagctccgggctaactacgtgccagcagccgcggtaatacgtagggagcaagcgttgtccgggattcactgggcgtaaagagcacgtaggcggttaattaagtcaggtgtgaaagttttcggctcaaccggaaaagtgcacttgaaactggataacttgagtatcggagaggtaagcggaattcctagtgtagcggtgaaatgcgtagagattaggaagaacaccggtggcgaaggcggcttactggacgataactgacgctgaggtgcgaaagcgtggggagcgaacaggattagataccctggtagtccacgccgtaaacgatgaatactaggtgttggggtaactcagtgccgcagttaacacattaagtattccgcctggggagtacgctcgcaagagtgaaactcaaaggaattgacgggggcccgcacaagcagcggagcatgtggtttaattcgaagcaacgcgaagaaccttaccaggtcttgacatcccttgaccgcctaagagattaggctttccttcgggacaagggagacaggtggtgcatggttgtcgtcagctcgtgtcgtgagatgttgggttaagtcccgcaacgagcgcaacccttatgtttagttactaacattcagttgaggactctagacagactgcccttgaaagagggaggaaggtggggacgacgtcaaatcatcatgccccttacgacctgggctacacacgtgctacaatggtctgtacagagggttgcgaagcagtgatgctaagctaatctcaaaaagcagatctcagttcggattgcaggctgcaactcgcctgcatgaagtcggagttgctagtaatcgcgaatcagaatgtcgcggtgaatgcgttcccgggccttgtacacaccgcccgtcacaccacgagagttggtaacacccga

SEQ ID NO: 208 - DNA, 1318 bp, Artificial Sequence
  STR00140 Collinsella_aerofaciens_strain_JCM_10188_16S_ribosomal_RNA
gtggcggacgggtgagtaacgcgtgggtaacctgccttatacagggggataacagtcagaaatggctgctaataccgcataagcgcacagagctgcatggctcagtgtgaaaaactccggtggtataagatggacccgcgttggattagcttgttggtggggtaacggcccaccaaggcgacgatccatagccggcctgagagggtgaacggccacattgggactgagacacggcccagactcctacgggaggcagcagtggggaatattgcacaatgggggaaaccctgatgcagcgacgccgcgtgaaggaagaagtatctcggtatgtaaacttctatcagcagggaagatagtgacggtacctgactaagaagccccggctaactacgtgccagcagccgcggtaatacgtagggggcaagcgttatccggatttactgggtgtaaagggagcgtagacggtgtggcaagtctgatgtgaaaggcatgggctcaacctgtggactgcattggaaactgtcatacttgagtgccggaggggtaagcggaattcctagtgtagcggtgaaatgcgtagatattaggaggaacaccagtggcgaaggcggcttactggacggtaactgacgttgaggctcgaaagcgtggggagcaaacaggattagataccctggtagtccacgccgtaaacgatgaatactaggtgtcggggagcatggctcttcggtgccgtcgcaaacgcagtaagtattccacctggggagtacgttcgcaagaatgaaactcaaaggaattgacggggacccgcacaagcggtggagcatgtggtttaattcgaagcaacgcgaagaaccttaccaagtcttgacatccctctgaccggtccttaatcggaccttttcttcgggacagaggagacaggtggtgcatggttgtcgtcagctcgtgtcgtgagatgttgggttaagtcccgcaacgagcgcaacccctatcctcagtagccagcatttaaggtgggcactctggggagactgccagggataacctggaggaaggcggggatgacgtcaaatcatcatgccccttatgatttgggctacacacgtgctacaatggcgtaaacaaagggaagcgagatcgtgagatggagcaaatcccaaaaataacgtcccagttcggactgtagtctgcaacccgactacacgaagctggaatcgctagtaatcgcggatcagaatgccgcggtgaatacgttcccgggtcttgtacacaccgcccgtcacaccatgggagtcagtaacgcccgaagtcagtg

SEQ ID NO: 209 - DNA, 1369 bp, Artificial Sequence
  STR00004 Collinsella_aerofaciens_strain_JCM_10188_16S_ribosomal_RNA
  misc_feature (941)..(941): n is a, c, g, or t
ggcagcatgatttgtagcaatacagattgatggcgaccggcgcacgggtgagtaacgcgtatgcaacttacctatcagagggggatagcccggcgaaagtcggattaataccccataaaacaggggtcccgcatgggaatatttgttaaagattcatcgctgatagataggcatgcgttccattaggcagttggcggggtaacggcccaccaaaccgacgatggataggggttctgagaggaaggtcccccacattggtactgagacacggaccaaactcctacgggaggcagcagtgaggaatattggtcaatggccgagaggctgaaccagccaagtcgcgtgaaggaagaaggatctatggtttgtaaacttcttttataggggaataaagtggaggacgtgtccttttttgtatgtaccctatgaataagcatcggctaactccgtgccagcagccgcggtaatacggaggatgcgagcgttatccggatttattgggtttaaagggtgcgtaggtggtgatttaagtcagcggtgaaagtttgtggctcaaccataaaattgccgttgaaactgggttacttgagtgtgtttgaggtaggcggaatgcgtggtgtagcggtgaaatgcatagatatcacgcagaactccgattgcgaaggcagcttactaaaccataactgacactgaagcacgaaagcgtggggatcaaacaggattagataccctggtagtccacgcagtaaacgatgattactaggagtttgcgatacaatgtaagctctacagcgaaagcgttaagtaatccacctggggagtacgccggcaacggtgaaactcaaaggaattgacgggggcccgcacaagcggaggaacatgtggtttaattcgatgatacgcgaggaaccttacccgggtttgaacgtagtctgaccggnagtggaaacactctttctagcaatagcagattacgaggtgctgcatggttgtcgtcagctcgtgccgtgaggtgtcggcttaagtgccataacgagcgcaacccttatcactagttactaacaggtgaagctgaggactctggtgagactgccagcgtaagctgtgaggaaggtggggatgacgtcaaatcagcacggcccttacatccggggcgacacacgtgttacaatggcatggacaaagggcagctacctggtgacaggatgctaatctccaaaccatgtctcagttcggatcggagtctgcaactcgactccgtgaagctggattcgctagtaatcgcgcatcagccatggcgcggtgaatacgttcccgggccttgtacacaccgcccgtcaagccatgggagccgggggtacctgaagtc

SEQ ID NO: 210 - DNA, 1383 bp, Artificial Sequence
  STR00141 Collinsella_aerofaciens_strain_JCM_10188_16S_ribosomal_RNA
gtcgaacgaagcattttgaatgaagttttcggatggattttagagagtgactgagtggcggacgggtgagtaacacgtggataacctgcctcacactgggggacaacagttagaaatgactgctaataccgcataagcgcacagtaccgcatggtacagtgtgaaaaactccggtggtgtgagatggatccgcgtctgattagccagttggcggggtaacggcccaccaaagcgacgatcagtagccgacctgagagggtgaccggccacattgggactgagacacggcccaaactcctacgggaggcagcagtggggaatattgcacaatgggcgaaagcctgatgcagcgacgccgcgtgagtgaagaagtatttcggtatgtaaagctctatcagcagggaagataatgacggtacctgactaagaagccccggctaactacgtgccagcagccgcggtaatacgtagggggcaagcgttatccggatttactgggtgtaaagggagcgtagacggcatggcaagtctgaagtgaaaacccagggctcaaccctgggactgctttggaaactgtcaagctagagtgcaggagaggtaagtggaattcctagtgtagcggtgaaatgcgtagatattaggaggaacaccagtggcgaaggcggcttactggactgtaactgacgttgaggctcgaaagcgtggggagcaaacaggattagataccctggtagtccacgccgtaaacgatgagtgctaggtgttggggggcaaagcccttcggtgccgtcgcaaacgcaataagcactccacctggggagtacgttcgcaagaatgaaactcaaaggaattgacggggacccgcacaagcggtggagcatgtggtttaattcgaagcaacgcgaagaaccttaccaagtcttgacatccttttgaccggcgtgtaacggcgcctttccttcgggacaagagagacaggtggtgcatggttgtcgtcagctcgtgtcgtgagatgttgggttaagtcccgcaacgagcgcaacccttatccttagtagccagcattaagatgggcactctagggagactgccagggacaacctggaggaaggtggggatgacgtcaaatcatcatgccccttatgatttgggctacacacgtgctacaatggcgtaaacaaagggaagcgaccctgcgaaggtgagcaaatctcaaaaataacgtcccagttcggactgtagtctgcaacccgactacacgaagctggaatcgctagtaatcgcgaatcagaatgtcgcggtgaatacgttcccgggtcttgtacacaccgcccgtcacaccatgggagtcagcaacgcccgaagtcagtgacccaactcgca

SEQ ID NO: 211 - DNA, 1371 bp, Artificial Sequence
  STR00008 Collinsella_aerofaciens_strain_JCM_10188_16S_ribosomal_RNA
tcgagcgagaggagttccttcgggaacaaatctagcggcggacgggtgagtaacacgtgggcaacctgccttgtagaggggaatagccttccgaaaggaagattaataccgcataacattacattttcgcatgaagaagtaattaaaggagcaatccgctacaagatgggcccgcggcgcattagctagttggtgaggtaacggctcaccaaggcgacgatgcgtagccgacctgagagggtgatcggccacattgggactgagacacggcccagactcctacgggaggcagcagtggggaatattgcacaatgggggaaaccctgatgcagcaacgccgcgtgagtgatgaaggttttcggatcgtaaagctctgtcttcagggacgataatgacggtacctgaggaggaagccacggctaactacgtgccagcagccgcggtaatacgtaggtggcgagcgttgtccggatttactgggcgtaaagggagcgtaggcggatttttaagtgagatgtgaaatacccgggctcaacttgggtgctgcatttcaaactggaagtctagagtgcaggagaggagagtggaattcctagtgtagcggtgaaatgcgtagagattaggaagaacaccagtggcgaaggcgactctctggactgtaactgacgctgaggctcgaaagcgtggggagcaaacaggattagataccctggtagtccacgccgtaaacgatgaatactaggtgtaggggttgtcatgacctctgtgccgccgcaaacgcattaagtattccgcctggggagtacggtcgcaagattaaaactcaaaggaattgacgggggcccgcacaagcagcggagcatgtggtttaattcgaagcaacgcgaagaaccttacctagacttgacatctcctgcattactcttaatcgaggaagtcccttcggggacaggatgacaggtggtgcatggttgtcgtcagctcgtgtcgtgagatgttgggttaagtcccgcaacgagcgcaacccttattgttagttgctaccatttagttgagcactctagcgagactgcccgggttaaccgggaggaaggtggggatgacgtcaaatcatcatgccccttatgtctagggctacacacgtgctacaatggcaagtacaaagagatgcgataccgcgaggtggagctaaactataaaacttgtctcagttcggattgtaggctgaaactcgcctacatgaagctggagttgctagtaatcgcgaatcagaatgtcgcggtgaatacgttcccgggccttgtacacaccgcccgtcacaccatgagagttggcaatacccaaagttcgtgagctaacccgtaagggagg

SEQ ID NO: 212 - DNA, 1367 bp, Artificial Sequence
  STR00009 Collinsella_aerofaciens_strain_JCM_10188_16S_ribosomal_RNA
  misc_feature (17)..(17): n is a, c, g, or t
  misc_feature (27)..(27): n is a, c, g, or t
  misc_feature (29)..(30): n is a, c, g, or t
  misc_feature (32)..(32): n is a, c, g, or t
gtcgagcgagtggatgnttcttcggancnngnagctagcggcggacgggtgagtaacacgtgggcaacctgcctcatagaggggaatagcctcccgaaagggagattaataccgcataagattgtagcttcgcatgaagtagcaattaaaggagcaatccgctatgagatgggcccgcggcgcattagctagttggtgaggtaacggctcaccaaggcgacgatgcgtagccgacctgagagggtgatcggccacattgggactgagacacggcccagactcctacgggaggcagcagtggggaatattgcacaatgggggaaaccctgatgcagcaatgccgcgtgagtgatgacggccttcgggttgtaaagctctgtcttcggggacgataatgacggtacccgaggaggaagccacggctaactacgtgccagcagccgcggtaatacgtaggtggcaagcgttgtccggatttactgggcgtaaagggagcgtaggcggatttttaagtgagatgtgaaatacccgggcttaacttgggtgctgcatttcaaactggaagtctagagtgcaggagaggagaagggaattcctagtgtagcggtgaaatgcgtagagattaggaagaacaccagtggcgaaggcgcttctctggactgtaactgacgctgaggctcgaaagcgtggggagcaaacaggattagataccctggtagtccacgccgtaaacgatgaatactaggtgtaggggttgtcatgacctctgtgccgccgctaacgcattaagtattccgcctggggagtacggtcgcaagattaaaactcaaaggaattgacgggggcccgcacaagcagcggagcatgtggtttaattcgaagcaacgcgaagaaccttacctagacttgacatctcctgaattacccgtaactggggaagtcgcttcggcgacaggaagacaggtggtgcatggttgtcgtcagctcgtgtcgtgagatgttgggttaagtcccgcaacgagcgcaacccttattgttagttgctaccatttagttgagcactctagcgagactgcccgggttaaccgggaggaaggtggggatgacgtcaaatcatcatgccccttatgtctagggctacacacgtgctacaatggcaagtacaaagagaagcaagaccgcgaggtggagcaaaactcaaaaacttgtctcagttcggattgtaggctgaaactcgcctacatgaagctggagttgctagtaatcgcgaatcagcatgtcgcggtgaatacgttcccgggccttgtacacaccgcccgtcacaccatgagagttggcaatacccaaagtgcgtgatctaactcgca

SEQ ID NO: 213 - DNA, 1333 bp, Artificial Sequence
  STR00064 Collinsella_aerofaciens_strain_JCM_10188_16S_ribosomal_RNA
gcttgctttgtacattttagtggcggacgggtgagtaacacgtgagcaacctgcctttgtgaggggaataacgtctggaaacggacgctaataccgcataacgtcaaggaaccgcatggttttttgaccaaagattttatcgcacaaagatgggctcgcggctgattagctagttggtgaggtaacggcccaccaaggcgacgatcagtagccggactgagaggttgatcggccacattgggactgagacacggcccagactcctacgggaggcagcagtgggggatattgcacaatgggggaaaccctgatgcagcgacgccgcgtgagggaagacggttttcggattgtaaacctctgtcttcagggacgaaacaaatgacggtacctgaggaggaagccacggctaactacgtgccagcagccgcggtaatacgtaggtggcaagcgttgtccggaattactgggtgtaaagggagcgtaggcgggaatgcaagttgaatgtttaaactatcggctcaactgataatcgcgttcaaaactgcatttcttgagtggagtagaggcaggcggaattcctagtgtagcggtgaaatgcgtagatattaggaggaacaccagtggcgaaggcggcctgctgggctctaactgacgctgaggctcgaaagcgtgggtagcaaacaggattagataccctggtagtccacgctgtaaacgatgattactaggtgtggggggactgaccccttccgtgccggagttaacacaataagtaatccacctggggagtacggtcgcaagactgaaactcaaaggaattgacgggggcccgcacaagcagtggagtatgtggtttaattcgaagcaacgcgaagaaccttaccaggtcttgacatcgtgcgcataacctagagataggtgaagcccttcggggcgcacagacaggtggtgcatggttgtcgtcagctcgtgtcgtgagatgttgggttaagtcccgcaacgagcgcaacccttattattagttgctacgcaagagcactctaatgagactgccgttgacaaaacggaggaaggtggggatgacgtcaaatcatcatgccccttatgacctgggctacacacgtactacaatggcacttaacagagggaagcaagaccgcgaggtggagcaaacccccaaaaagtgtctcagttcggattgcaggctgaaacccgcctgtatgaagtcggaattgctagtaatcgcggatcagcatgccgcggtgaatacgttcccgggccttgtacacaccgcccgtcacaccatgagagccggtaacacccgaagtcagta

SEQ ID NO: 214 - DNA, 1325 bp, Artificial Sequence
  STR00028 Collinsella_aerofaciens_strain_JCM_10188_16S_ribosomal_RNA
cggagagagcggcggacgggtgagtaacgcgtgggtaacctgccctgtacacacggataacataccgaaaggtatactaatacgggataacatatgaaagtcgcatggcttttgtatcaaagctccggcggtacaggatggacccgcgtctgattagctagttggtaaggtaatggcttaccaaggcaacgatcagtagccgacctgagagggtgatcggccacactggaactgagacacggtccagactcctacgggaggcagcagtggggaatattgcacaatgggcgaaagcctgatgcagcaacgccgcgtgagcgatgaaggccttcgggtcgtaaagctctgtcctcaaggaagataatgacggtacttgaggaggaagccccggctaactacgtgccagcagccgcggtaatacgtagggggctagcgttatccggaattactgggcgtaaagggtgcgtaggtggttttttaagtcagaagtgaaaggctacggctcaaccgtagtaagcttttgaaactagagaacttgagtgcaggagaggagagtagaattcctagtgtagcggtgaaatgcgtagatattaggaggaataccagtagcgaaggcggctctctggactgtaactgacactgaggcacgaaagcgtggggagcaaacaggattagataccctggtagtccacgccgtaaacgatgagtactaggtgtcgggggttacccccctcggtgccgcagctaacgcattaagtactccgcctgggaagtacgctcgcaagagtgaaactcaaaggaattgacggggacccgcacaagtagcggagcatgtggtttaattcgaagcaacgcgaagaaccttacctaagcttgacatcccactgacctctccctaatcggagatttcccttcggggacagtggtgacaggtggtgcatggttgtcgtcagctcgtgtcgtgagatgttgggttaagtcccgcaacgagcgcaacccttgcctttagttgccagcattaagttgggcactctagagggactgccgaggataactcggaggaaggtggggatgacgtcaaatcatcatgccccttatgcttagggctacacacgtgctacaatgggtggtacagagggttgccaagccgcgaggtggagctaatcccttaaagccattctcagttcggattgtaggctgaaactcgcctacatgaagctggagttactagtaatcgcagatcagaatgctgcggtgaatgcgttcccgggtcttgtacacaccgcccgtcacaccatggaagttgggggcgcccgaagccggtt

SEQ ID NO: 215 - DNA, 1299 bp, Artificial Sequence
  STR00083.5 Collinsella_aerofaciens_strain_JCM_10188_16S_ribosomal_RNA
  misc_feature (316)..(316): n is a, c, g, or t
  misc_feature (328)..(328): n is a, c, g, or t
gtgagtaacgcgtgggcaacctgccccataccgggggataacagccagaaatggctgctaataccgcataagcgcacagcgccccatggcgcggtgtgaaaaactccggtggtatgggatgggcccgcgtctgattaggtagttggcggggtaacggcccaccaagccgacgatcagtagccgacctgagagggtgaccggccacattgggactgagacacggcccaaactcctacgggaggcagcagtggggaatattgcacaatgggggaaaccctgatgcagcgacgccgcgtgagcgaagaagtatttcggntatgtaaagctnctatcagcagggaagaaaaatgacggtacctgactaagaagccccggctaactacgtgccagcagccgcggtaatacgtagggggcaagcgttatccggatttactgggtgtaaagggagcgtagacggccaggcaagtctgatgtgaaaggcaggggctcaacccctggactgcattggaaactgtcaggctggagtgccggagaggtaagcggaattcctagtgtagcggtgaaatgcgtagatattaggaggaacaccagtggcgaaggcggcttactggacggtaactgacgttgatgctcgaaagcgtggggagcaaacaggattagataccctggtagtccacgccgtaaacgatgaatactaggtgtcggggggcaaagcccttcggtgccgccgcaaacgcattaagtattccacctggggagtacgttcgcaagaatgaaactcaaaggaattgacggggacccgcacaagcggtggagcatgtggtttaattcgaagcaacgcgaagaaccttaccaagccttgacatcccattgaagccagagtaacgtctgacggccttcgggacaatggagacaggtggtgcatggttgtcgtcagctcgtgtcgtgagatgttgggttaagtcccgcaacgagcgcaacccttatcttcagtagccagcacgcggaggtgggcactctggagagactgccagggacaacctggaggaaggtggggatgacgtcaaatcatcatgccccttatggcttgggctacacacgtgctacaatggcgtaaacagagggaagcagccctgcgaaggtgagcgaatcccaaaaataacgtctcagttcggattgtagtctgcaactcgactacatgaagctggaatcgctagtaatcgcgaatcagaatgtcgcggtgaatacgttcccgggtcttgtacacaccgcccgtcacaccatgggagtcagtaacgc

SEQ ID NO: 216 - DNA, 1367 bp, Artificial Sequence
  STR00130 Collinsella_aerofaciens_strain_JCM_10188_16S_ribosomal_RNA
  misc_feature (39)..(39): n is a, c, g, or t
ggccccgacttcttcggaacgaggagccttgcgactgantggcggacgggtgagtaacgcgtgggcaacctgccttgcactgggggataacagccagaaatggctgctaataccgcataagaccgaagcgccgcatggcgcggcggccaaagccccggcggtgcaagatgggcccgcgtctgattaggtagttggcggggtaacggcccaccaagccgacgatcagtagccgacctgagagggtgaccggccacattgggactgagacacggcccagactcctacgggaggcagcagtggggaatattgcacaatgggggaaaccctgatgcagcgacgccgcgtgaaggatgaagtatttcggtatgtaaacttctatcagcagggaagaagatgacggtacctgactaagaagccccggctaactacgtgccagcagccgcggtaatacgtagggggcaagcgttatccggatttactgggtgtaaagggagcgtagacggcgatgcaagccagatgtgaaagcccggggctcaaccccgggactgcatttggaactgcgtggctggagtgtcggagaggcaggcggaattcctagtgtagcggtgaaatgcgtagatattaggaggaacaccagtggcgaaggcggcctgctggacgatgactgacgttgaggctcgaaagcgtggggagcaaacaggattagataccctggtagtccacgccgtaaacgatgactactaggtgtcgggtggcaaggccattcggtgccgcagcaaacgcaataagtagtccacctggggagtacgttcgcaagaatgaaactcaaaggaattgacggggacccgcacaagcggtggagcatgtggtttaattcgaagcaacgcgaagaaccttacctgatcttgacatcccgatgccaaagcgcgtaacgcgctctttcttcggaacatcggtgacaggtggtgcatggttgtcgtcagctcgtgtcgtgagatgttgggttaagtcccgcaacgagcgcaacccctatcttcagtagccagcattttggatgggcactctggagagactgccagggagaacctggaggaaggtggggatgacgtcaaatcatcatgccccttatgaccagggctacacacgtgctacaatggcgtaaacaaagggaggcgaacccgcgagggtgggcaaatcccaaaaataacgtctcagttcggattgtagtctgcaactcgactacatgaagctggaatcgctagtaatcgcgaatcagaatgtcgcggtgaatacgttcccgggtcttgtacacaccgcccgtcacaccatgggagtcagtaacgcccgaagccggtgacccaacccgt

SEQ ID NO: 217 - DNA, 1336 bp, Artificial Sequence
  STR00090.1 Collinsella_aerofaciens_strain_JCM_10188_16S_ribosomal_RNA
  misc_feature (943)..(943): n is a, c, g, or t
  misc_feature (954)..(957): n is a, c, g, or t
ttgctcctcaaagttagtggcggacgggtgagtaacgcgtgggtaacctgccctatgcagggggataacgtttggaaacgaacgctaataccgcataacctagttggttcgcatgaactgactagcaaagatttatcggcataggatggacccgcgttagattagctagttggtgagataacagcccaccaaggcaacgatctatagccggcctgagagggtgaacggccacactgggactgagacacggcccagactcctacgggaggcagcagtggggaatattgcacaatgggcgcaagcctgatgcagcgacgccgcgtgaaggatgaaggtcttcggatcgtaaacttctatcagcagggaagaataccatgacggtacctgactaagaagccccggctaactacgtgccagcagccgcggtaatacgtagggggcaagcgttatccgggaattactgggtgtaaagggtgcgtaggtggcgatttaagtcagatgtgaaaactcagggctcaaccttgagactgcatctgaaactgagttgctagagtgcaggagaggaaagcggaattccgagtgtagcggtgaaatgcgtagatattcggaggaacaccagtagcgaaggcggctttctggactgtaactgacactgaggcacgaaagcgtggggagcgaacaggattagataccctggtagtccacgccgtaaacgatgaatactaggtgtcggggctcacgggtctcggtgccgcagctaacgcattaagtattccacctgggaagtacgaccgcaaggttgaaactcaaaggaattgacggggacccgcacaagcggtggagcatgtggtttaattcgaagcaacgcgaagaaccttacctaaacttgacatccttttgaccgatccttaatcggatctttactagcttgctagtacagaangtgacaggtgnnnngtgcatggttgtcgtcagctcgtgtcgtgagatgttgggttaagtcccgcaacgagcgcaacccctatctttagtagccatcattcagttgggcactctagagagactgccagggataacctggaggaaggtggggatgacgtcaaatcatcatgccccttatgtttagggctacacacgtgctacaatgggtgctacaaagggaagcaaaaccgcgaggtcaagcaaatcccaaaaaggcactcccagttcggattgtagtctgcaactcgactacatgaagttggaatcgctagtaatcgcgaatcagaatgtcgcggtgaatacgttcccgggtcttgtacacaccgcccgtcacaccacgggagttgggggggcc

SEQ ID NO: 218 - DNA, 1315 bp, Artificial Sequence
  STR00065.1 Collinsella_aerofaciens_strain_JCM_10188_16S_ribosomal_RNA
  misc_feature (449)..(449): n is a, c, g, or t
gaggacagtgactgagcggcggacgggtgagtaacgcgtgggcaacctgcctcatacagggggataacagttagaaatgactgctaataccgcataagcgcacaggaccgcatggtgtagtgtgaaaaactccggtggtatgagatggacccgcgtctgattaggtagttggtggggtaaaggcctaccaagccgacgatcagtagccgacctgagagggtgaccggccacattgggactgagacacggcccaaactcctacgggaggcagcagtggggaatattgcacaatgggggaaaccctgatgcagcgacgccgcgtgaaggaagaagtatttcggtatgtaaacttctatcagcagggaagaagatgacggtacctgagtaagaagcaccggctaaatacgtgccagcagccgcggtaatacgtatggtgcaagcgttatccnggatttactgggtgtaaagggagcgtagacggataggcaagtctggagtgaaaacccagggctcaaccctgggactgctttggaaactgcagatctggagtgccggagaggtaagcggaattcctagtgtagcggtgaaatgcgtagatattaggaggaacaccagtggcgaaggcggcttactggacggtgactgacgttgaggctcgaaagcgtggggagcaaacaggattagataccctggtagtccacgccgtaaacgatgactactaggtgtcggtgtgcaaagcacatcggtgccgcagcaaacgcaataagtagtccacctggggagtacgttcgcaagaatgaaactcaaaggaattgacggggacccgcacaagcggtggagcatgtggtttaattcgaagcaacgcgaagaaccttacctggtcttgacatccggatgacgggcgagtaatgtcgccgtcccttcggggcatccgagacaggtggtgcatggttgtcgtcagctcgtgtcgtgagatgttgggttaagtcccgcaacgagcgcaacccttatcttcagtagccagcatataaggtgggcactctggagagactgccagggagaacctggaggaaggtggggatgacgtcaaatcatcatgccccttatggccagggctacacacgtgctacaatggcgtaaacaaagggaagcgagagggtgacctggagcgaatcccaaaaataacgtttcagttcggattgtagtctgcaactcgactacatgaagctggaatcgctagtaatcgcggatcagcatgccgcggtgaatacgttcccgggtcttgtacaccccccccgtcacaccatgggagtca

SEQ ID NO: 219 - DNA, 1370 bp, Artificial Sequence
  STR00072.1 Collinsella_aerofaciens_strain_JCM_10188_16S_ribosomal_RNA
  misc_feature (13)..(13): n is a, c, g, or t
  misc_feature (15)..(15): n is a, c, g, or t
  misc_feature (25)..(25): n is a, c, g, or t
  misc_feature (27)..(29): n is a, c, g, or t
cgagcgagtggangnttcttcggancnnnagctagcggcggacgggtgagtaacacgtgggcaacctgcctcatagaggggaatagcctcccgaaagggagattaataccgcataagattgtagcttcgcatgaagtagcaattaaaggagcaatccgctatgagatgggcccgcggcgcattagctagttggtgaggtaacggctcaccaaggcgacgatgcgtagccgacctgagagggtgatcggccacattgggactgagacacggcccagactcctacgggaggcagcagtggggaatattgcacaatgggggaaaccctgatgcagcaatgccgcgtgagtgatgacggccttcgggttgtaaagctctgtcttcggggacgataatgacggtacccgaggaggaagccacggctaactacgtgccagcagccgcggtaatacgtaggtggcaagcgttgtccggatttactgggcgtaaagggagcgtaggcggatttttaagtgagatgtgaaatacccgggcttaacttgggtgctgcatttcaaactggaagtctagagtgcaggagaggagaagggaattcctagtgtagcggtgaaatgcgtagagattaggaagaacaccagtggcgaaggcgcttctctggactgtaactgacgctgaggctcgaaagcgtggggagcaaacaggattagataccctggtagtccacgccgtaaacgatgaatactaggtgtaggggttgtcatgacctctgtgccgccgctaacgcattaagtattccgcctggggagtacggtcgcaagattaaaactcaaaggaattgacgggggcccgcacaagcagcggagcatgtggtttaattcgaagcaacgcgaagaaccttacctagacttgacatctcctgaattacccgtaactggggaagtcgcttcggcgacaggaagacaggtggtgcatggttgtcgtcagctcgtgtcgtgagatgttgggttaagtcccgcaacgagcgcaacccttattgttagttgctaccatttagttgagcactctagcgagactgcccgggttaaccgggaggaaggtggggatgacgtcaaatcatcatgccccttatgtctagggctacacacgtgctacaatggcaagtacaaagagaagcaagaccgcgaggtggagcaaaactcaaaaacttgtctcagttcggattgtaggctgaaactcgcctacatgaagctggagttgctagtaatcgcgaatcagcatgtcgcggtgaatacgttcccgggccttgtacacaccgcccgtcacaccatgagagttggcaatacccaaagtgcgtgatctaactcgcaagagag

SEQ ID NO: 220 - DNA, 1350 bp, Artificial Sequence
  STR00110 Collinsella_aerofaciens_strain_JCM_10188_16S_ribosomal_RNA
tcggggtgagcggcggacgggtgagtaacgcgtgggtaacctgccctgtacacacggataacataccgaaaggtatgctaatacgggataacatatgagagtcgcatggcttttgtatcaaagctccggcggtacaggatggacccgcgtctgattagctagttggtaaggtaacggcttaccaaggcaacgatcagtagccgacctgagagggtgatcggccacattggaactgagacacggtccaaactcctacgggaggcagcagtggggaatattgcacaatgggcgaaagcctgatgcagcaacgccgcgtgagcgatgaaggccttcgggtcgtaaagctctgtcctcaaggaagataatgacggtacttgaggaggaagccccggctaactacgtgccagcagccgcggtaatacgtagggggctagcgttatccgggaattactgggcgtaaagggtgcgtaggcggtctttcaagccagaagtgaaaggctacggctcaaccgtagtaagcttttggaactgtaggacttgagtgcaggagaggagagtggaattcctagtgtagcggtgaaatgcgtagatattaggaggaacaccagtagcgaaggcggctctctggactgtaactgacgctgaggcacgaaagcgtggggagcaaacaggattagataccctggtagtccacgccgtaaacgatgagtactaggtgtcgggggttacccccctcggtgccgcagctaacgcattaagtactccgcctgggaagtacgctcgcaagagtgaaactcaaaggaattgacggggacccgcacaagtagcggagcatgtggtttaattcgaagcaacgcgaagaaccttacctaagcttgacatcccattgacctctccctaatcggagatttcccttcggggacagtggtgacaggtggtgcatggttgtcgtcagctcgtgtcgtgagatgttgggttaagtcccgcaacgagcgcaacccttgcctttagttgccagcattaagttgggcactctagagggactgccgaggataactcggaggaaggtggggatgacgtcaaatcatcatgccccttatgcttagggctacacacgtgctacaatgggtggtacagagggttgccaagccgtgaggtggagctaatcccttaaagccattctcagttcggattgtaggctgaaactcgcctacatgaagctggagttactagtaatcgcagatcagaatgctgcggtgaatgcgttcccgggtcttgtacacaccgcccgtcacaccatgggagttgggggcgcccgaagccggttagctaaccttttaggaagcggcc

SEQ ID NO: 221 - DNA, 1371 bp, Artificial Sequence
  STR00019.1 Collinsella_aerofaciens_strain_JCM_10188_16S_ribosomal_RNA
  misc_feature (1324)..(1324): n is a, c, g, or t
agagattagcttgctaagatcagaactttgtattgactgagtggcggacgggtgagtaacgcgtgggcaacctgccttacacagggggataacagctagaaatggctgctaataccgcataagacctcagtaccgcatggtagaggggtaaaaactccggtggtgtaagatgggcccgcgtctgattaggtagttggtagggtaacggcctaccaagccgacgatcagtagccgacctgagagggtgaccggccacattgggactgagacacggcccaaactcctacgggaggcagcagtggggaatattgcacaatgggggaaaccctgatgcagcgacgccgcgtgaaggatgaagtatttcggtatgtaaacttctatcagcagggaagaagatgacggtacctgactaagaagccccggctaactacgtgccagcagccgcggtaatacgtagggggcaagcgttatccggatttactgggtgtaaagggagcgtagacggcatggcaagtctgaagtgaaagcccggggctcaaccccgggactgctttggaaactgtcaggctagagtgtcggagaggcaagtggaattcctagtgtagcggtgaaatgcgtagatattaggaggaacaccagtggcgaaggcggcttgctggacgatgactgacgttgaggctcgaaagcgtggggagcaaacaggattagataccctggtagtccacgccgtaaacgatgattactaggtgtcgggaagcaaagctttttcggtgccgcagccaacgcaataagtaatccacctggggagtacgttcgcaagaatgaaactcaaaggaattgacggggacccgcacaagcggtggagcatgtggtttaattcgaagcaacgcgaagaacccttacctgatcttgacatcccggtgacaaagtatgtaatgtactctttcttcggaacaccggtgacaggtggtgcatggttgtcgtcagctcgtgtcgtgagatgttgggttaagtcccgcaacgagcgcaacccttatctttagtagccagcatttgaggtgggcactctagagagactgccagggataacctggaggaaggtggggatgacgtcaaatcatcatgccccttatgaccagggctacacacgtgctacaatggcgtaaacaaagggaagcgaccctgtgaaggcaagcaaatcccaaaaataacgtctcagttcggattgtagtctgcaactcgactacatgaagctggaatcgctagtaatcgcgaatcagaatgtcgcggtgaatacgttcccgggtcttgtacacaccgcccntcacaccatgggagtcagtaacgcccgaagccggtgacctaaccgaa

SEQ ID NO: 222 - DNA, 1310 bp, Artificial Sequence
  STR00010.7 Collinsella_aerofaciens_strain_JCM_10188_16S_ribosomal_RNA
  misc_feature (715)..(715): n is a, c, g, or t
  misc_feature (717)..(718): n is a, c, g, or t
  misc_feature (871)..(871): n is a, c, g, or t
acgggtgagtaacgcgtgggtaacctgccttatacagggggataacagtcagaaatggctgctaataccgcataagcgcacagagctgcatggctcagtgtgaaaaactccggtggtataagatggacccgcgttggattagctggttggtggggtaacggcccaccaaggcgacgatccatagccggcctgagagggtgaacggccacattgggactgagacacggcccagactcctacgggaggcagcagtggggaatattgcacaatgggggaaaccctgatgcagcgacgccgcgtgaaggaagaagtatctcggtatgtaaacttctatcagcagggaagatagtgacggtacctgactaagaagccccggctaactacgtgccagcagccgcggtaatacgtagggggcaagcgttatccggatttactgggtgtaaagggagcgtagacggtgtggcaagtctgatgtgaaaggcatgggctcaacctgtggactgcattggaaactgtcatacttgagtgccggaggggtaagcggaattcctagtgtagcggtgaaatgcgtagatattaggaggaacaccagtggcgaaggcggcttactggacggtaactgacgttgaggctcgaaagcgtggggagcaaacaggattagataccctggtagtccacgccgtaaacgatgaatactaggtgtcgggtggcagancnnttcggtgccgtcgcaaacgcagtaagtattccacctggggagtacgttcgcaagaatgaaactcaaaggaattgacggggacccgcacaagcggtggagcatgtgggtttaattcgaagcaacgcgaagaaccttaccaagtcttgacatccncctgaccgatccttaaccggatctttccttcgggacaggcgagacaggtggtgcatggttgtcgtcagctcgtgtcgtgagatgttgggttaagtcccgcaacgagcgcaacccctatcctcagtagccagcatttaaggtgggcactctggggagactgccagggataacctggaggaaggcggggatgacgtcaaatcatcatgccccttatgatttgggctacacacgtgctacaatggcgtaaacaaagggaagcgagattgtgagatggagcaaatcccaaaaataacgtcccagttcggactgtagtctgcaacccgactacacgaagctggaatcgctagtaatcgcggatcagaatgccgcggtgaatacgttcccgggtcttgtacacaccgcccgtcacaccatgggagtcagtaacgcccgaagtcag

SEQ ID NO: 223 - DNA, 1289 bp, Artificial Sequence
  STR00053.1 Collinsella_aerofaciens_strain_JCM_10188_16S_ribosomal_RNA
  misc_feature (208)..(208): n is a, c, g, or t
  misc_feature (440)..(440): n is a, c, g, or t
  misc_feature (743)..(743): n is a, c, g, or t
  misc_feature (1266)..(1267): n is a, c, g, or t
  misc_feature (1269)..(1269): n is a, c, g, or t
acctgccccatacaccggaataactcctggaaacgggtggtaatgccggatgctccagttgatcgcatggtcttctgggaaagctttcgcggtatgggatggggtcgcgtcctatcagcttgacggcggggtaacggcccaccgtggcttcgacgggtagccggcctgagagggcgaccggccacattgggactgaaatacggcccanactcctacgggaggcagcagtggggaatattgcacaatgggcgcaagcctgatgcagcgacgccgcgtgagggatggaggccttcgggttgtaaacctcttttatcggggagcaagcgagagtgagtttacccgttgaataagcaccggctaactacgtgccagcagccgcggtaatacgtagggtgcaagcgttatccggaattattgggcgtaaagggctcgtaggcggnttcgtcgcgtccggtgtgaaagtccatcgcttaacggtggatccgcgccgggtacgggcgggcttgagtgcggtaggggagactggaattcccggtgtaacggtggaatgtgtagatatcgggaagaacaccaatggcgaaggcaggtctctgggccgttactgacgctgaggagcgaaagcgtggggagcgaacaggattagataccctggtagtccacgccgtaaacggtggatgctggatgtggggcccgttccacgggttccgtgtcggagctaacgcgttaagcatcccgcctggggnagtacggccgcaaggctaaaactcaaagaaattgacgggggcccgcacaagcggcggagcatgcggattaattcgatgcaacgcgaagaaccttacctgggcttgacatgttcccgacggtcgtagagatacggcttcccttcggggcgggttcacaggtggtgcatggtcgtcgtcagctcgtgtcgtgagatgttgggttaagtcccgcaacgagcgcaaccctcgccccgtgttgccagcggattatgccgggaactcacgggggaccgccggggttaactcggaggaaggtggggatgacgtcagatcatcatgccccttacgtccagggcttcacgcatgctacaatggccggtacaacgggatgcgacgcggcgacgcggagcggatccctgaaaaccggtctcagttcggatcgcagtctgcaactcgactgcgtgaaggcggagtcgctagtaatcgcgaatcagcaacgtcgcggtgaatgcgttcccgggccttgtacacaccgcccgtcaanncntgaaagtgggcagcacccga

SEQ ID NO: 224 - DNA, 1381 bp, Artificial Sequence
  STR00029 Collinsella_aerofaciens_strain_JCM_10188_16S_ribosomal_RNA
cgaggggcagcacggtgtagcaatacactggtggcgaccggcgcacgggtgcgtaacgcgtatgcaacctacccataacagggggataacactgagaaattggtactaataccccataacatcaggaccggcatcggttctggttgaaaactccggtggttatggatgggcatgcgttgtattagctggttggtgaggtaacggctcaccaaggcaacgatacatagggggactgagaggttaaccccccacattggtactgagacacggaccaaactcctacgggaggcagcagtgaggaatattggtcaatggacgcaagtctgaaccagccatgccgcgtgcaggaagacggctctatgagttgtaaactgcttttgtacgagggtaaacgctcttacgtgtaagagcctgaaagtatcgtacgaataaggatcggctaactccgtgccagcagccgcggtaatacggaggatccaagcgttatccggatttattgggtttaaagggtgcgtaggcggtttgataagttagaggtgaaataccggtgcttaacaccggaactgcctctaatactgttgaactagagagtagttgcggtaggcggaatgtatggtgtagcggtgaaatgcttagagatcatacagaacaccgattgcgaaggcagcttaccaaactatatctgacgttgaggcacgaaagcgtggggagcaaacaggattagataccctggtagtccacgcagtaaacgatgataactcgctgtcggcgatacacggtcggcggctaagcgaaagcgataagttatccacctggggagtacgttcgcaagaatgaaactcaaaggaattgacgggggcccgcacaagcggaggaacatgtggtttaattcgatgatacgcgaggaaccttacccgggcttgaaagttactgacgattctggaaacaggatttcccttcggggcaggaaactaggtgctgcatggttgtcgtcagctcgtgccgtgaggtgtcgggttaagtcccataacgagcgcaacccctaccgttagttgccatcaggtcaagctgggcactctggcgggactgccggtgtaagccgagaggaaggtggggatgacgtcaaatcagcacggcccttacgtccggggctacacacgtgttacaatggtaggtacagagggcagctacccagtgatgggatgcgaatctcgaaagcctatctcagttcggatcggaggctgaaacccgcctccgtgaagttggattcgctagtaatcgcgcatcagccatggcgcggtgaatacgttcccgggccttgtacacaccgcccgtcaagccatggaagctgggggtgcctgaagttcgtgaccgcaaggag

SEQ ID NO: 225 - DNA, 1346 bp, Artificial Sequence
  STR00023.1 Collinsella_aerofaciens_strain_JCM_10188_16S_ribosomal_RNA
tggaagttgaattgactgagtggcggacgggtgagtaacgcgtgggtaacctgccttgtactgggggacaacagttagaaatgactgctaataccgcataagcgcacagtatcgcatgatacagtgtgaaaaactccggtggtacaagatggacccgcgtctgattagctagttggtaaggtaacggcttaccaaggcgacgatcagtagccgacctgagagggtgaccggccacattgggactgagacacggcccaaactcctacgggaggcagcagtggggaatattgcacaatgggcgaaagcctgatgcagcgacgccgcgtgagtgaagaagtatttcggtatgtaaagctctatcagcagggaagaaaatgacggtacctgactaagaagccccggctaactacgtgccagcagccgcggtaatacgtagggggcaagcgttatccggatttactgggtgtaaagggagcgtagacggtaaagcaagtctgaagtgaaagcccgcggctcaactgcgggactgctttggaaactgtttaactggagtgtcggagaggtaagtggaattcctagtgtagcggtgaaatgcgtagatattaggaggaacaccagtggcgaaggcgacttactggacgataactgacgttgaggctcgaaagcgtggggagcaaacaggattagataccctggtagtccacgccgtaaacgatgaatactaggtgttggggagcaaagctcttcggtgccgtcgcaaacgcagtaagtattccacctggggagtacgttcgcaagaatgaaactcaaaggaattgacggggacccgcacaagcggtggagcatgtggtttaattcgaagcaacgcgaagaacccttaccaggtcttgacatcgatccgacgggggagtaacgtccccttcccttcggggcggagaagacaggtggtgcatggttgtcgtcagctcgtgtcgtgagatgttgggttaagtcccgcaacgagcgcaacccttattctaagtagccagcggttcggccgggaactcttgggagactgccagggataacctggaggaaggtggggatgacgtcaaatcatcatgccccttatgatctgggctacacacgtgctacaatggcgtaaacaaagagaagcaagaccgcgaggtggagcaaatctcaaaaataacgtctcagttcggactgcaggctgcaactcgcctgcacgaagctggaatcgctagtaatcgcgaatcagaatgtcgcggtgaatacgttcccgggtcttgtacacaccgcccgtcacaccatgggagtcagtaacgcccgaagtcagtgacccaacc

SEQ ID NO: 226 - DNA, 1344 bp, Artificial Sequence
  STR00075.4 Collinsella_aerofaciens_strain_JCM_10188_16S_ribosomal_RNA
  misc_feature (398)..(401): n is a, c, g, or t
  misc_feature (463)..(463): n is a, c, g, or t
caacggattgagttacctagtggcggacgggtgagtaacgcgtgaggaacctgccttggagaggggaataacactccgaaaggagtgctaataccgcatgatgcagttgggtcgcatggctctgactgccaaagatttatcgctctgagatggcctcgcgtctgattagctagtaggcggggtaacggcccacctaggcgacgatcagtagccggactgagaggttgaccggccacattgggactgagacacggcccagactcctacgggaggcagcagtggggaatattgggcaatgggcgcaagcctgacccagcaacgccgcgtgaaggaagaaggctttcgggttgtaaacttcttttgtcggggacgaaacaaatgacggtacccgacgaatnnnnaagccacggctaactacgtgccagcagccgcggtaatacgtaggtggcaagcgttatccggnatttactgggtgtaaagggcgtgtaggcgggattgcaagtcagatgtgaaaactgggggctcaacctccagcctgcatttgaaactgtagttcttgagtgctggagaggcaatcggaattccgtgtgtagcggtgaaatgcgtagatatacggaggaacaccagtggcgaaggcggattgctggacagtaactgacgctgaggcgcgaaagcgtggggagcaaacaggattagataccctggtagtccacgccgtaaacgatggatactaggtgtggggggtctgaccccctccgtgccgcagttaacacaataagtatcccacctggggagtacgatcgcaaggttgaaactcaaaggaattgacgggggcccgcacaagcggtggagtatgtggtttaattcgaagcaacgcgaagaaccttaccagggcttgacatcccactaacgaagcagagatgcattaggtgcccttcggggaaagtggagacaggtggtgcatggttgtcgtcagctcgtgtcgtgagatgttgggttaagtcccgcaacgagcgcaacccttattgttagttgctacgcaagagcactctagcgagactgccgttgacaaaacggaggaaggtggggacgacgtcaaatcatcatgccccttatgtcctgggccacacacgtactacaatggtggttaacagagggaggcaataccgcgaggtggagcaaatccctaaaagccatcccagttcggattgcaggctgaaacccgcctgtatgaagttggaatcgctagtaatcgcggatcagcatgccgcggtgaatacgttcccgggccttgtacacaccgcccgtcacaccatgagagtcgggaacacccgaagtccgtag

SEQ ID NO: 227 - DNA, 1357 bp, Artificial Sequence
  STR00074 Collinsella_aerofaciens_strain_JCM_10188_16S_ribosomal_RNA
tcttcggattgaaattttagtgactgagtggcggacgggtgagtaacgcgtgggtaacctgcctcacacagggggataacagttggaaacggctgctaataccgcataagcgcacagtaccgcatggtacagtgtgaaaaactccggtggtgtgagatggacccgcgtctgattagctagttggcagggcaacggcctaccaaggcgacgatcagtagccgacctgagagggtgaccggccacattgggactgagacacggcccaaactcctacgggaggcagcagtggggaatattgcacaatgggggaaaccctgatgcagcgacgccgcgtgagcgaagaagtatttcggtatgtaaagctctatcagcagggaagaagaaatgacggtacctgactaagaagcaccggctaaatacgtgccagcagccgcggtaatacgtatggtgcaagcgttatccggatttactgggtgtaaagggagcgcaggcggaaggctaagtctgatgtgaaagcccggggctcaaccccggtactgcattggaaactggtcatctagagtgtcggaggggtaagtggaattcctagtgtagcggtgaaatgcgtagatattaggaggaacaccagtggcgaaggcggcttactggacgataactgacgctgaggctcgaaagcgtggggagcaaacaggattagataccctggtagtccacgccgtaaacgatgaatactaggtgtcgggaagcacagcttttcggtgccgccgcaaacgcattaagtattccacctggggagtacgttcgcaagaatgaaactcaaaggaattgacggggacccgcacaagcggtggagcatgtggtttaattcgaagcaacgcgaagaaccttaccaagtcttgacatccttctgaccggacagtaatgtgtcctttccttcgggacagaagtgacaggtggtgcatggttgtcgtcagctcgtgtcgtgagatgttgggttaagtcccgcaacgagcgcaacccttatccccagtagccagcggttcggccgggcactctgaggagactgccagggataacctggaggaaggtggggatgacgtcaaatcatcatgccccttatgacttgggctacacacgtgctacaatggcgtaaacaaagggaagcaagaccgtgaggtggagcaaatcccaaaaataacgtctcagttcggactgtagtctgcaacccgactacacgaagctggaatcgctagtaatcgcagatcagaatgctgcggtgaatacgttcccgggtcttgtacacaccgcccgtcacaccatgggagttggaaatgcccgaagtcagtgacccaaccgc

SEQ ID NO: 228 - DNA, 1346 bp, Artificial Sequence
  STR00103 Collinsella_aerofaciens_strain_JCM_10188_16S_ribosomal_RNA
caacggattgagttacctagtggcggacgggtgagtaacgcgtgaggaacctgccttggagagggggataacactccgaaaggagtgctaataccgcatgatgcagttgggtcgcatggctctgactgccaaagatttatcgctctgagatggcctcgcgtctgattagctagtaggtggggtaacggcccacctaggcgacgatcagtagccggactgagaggttgaccggccacattgggactgagacacggcccagactcctacgggaggcagcagtggggaatattgggcaatgggcgcaagcctgacccagcaacgccgcgtgaaggaagaaggctttcgggttgtaaacttcttttgtcagggacgaaacaaatgacggtacctgacgaataagccacggctaactacgtgccagcagccgcggtaatacgtaggtggcaagcgttatccgggatttactgggtgtaaagggcgtgtaggcgggattgcaagtcagatgtgaaaactgggggctcaacctccagcctgcatttgaaactgtagttcttgagtgctggagaggcaatcggaattccgtgtgtagcggtgaaatgcgtagatatacggaggaacaccagtggcgaaggcggattgctggacagtaactgacgctgaggcgcgaaagcgtggggagcaaacaggattagataccctggtagtccacgccgtaaacgatggatactaggtgtggggggtctgaccccctccgtgccgcagttaacacaataagtatcccacctggggagtacgatcgcaaggttgaaactcaaaggaattgacgggggcccgcacaagcggtggagtatgtggtttaattcgaagcaacgcgaagaaccttaccagggcttgacatcccactaacgaagcagagatgcattaggtgcccttcggggaaagtggagacaggtggtgcatggttgtcgtcagctcgtgtcgtgagatgttgggttaagtcccgcaacgagcgcaacccttattgttagttgctacgcaagagcactctagcgagactgccgttgacaaaacggaggaaggtggggacgacgtcaaatcatcatgccccttatgtcctgggccacacacgtactacaatggtggttaacagagggaggcaaaaccgcgaggtggagcaaatccctaaaagccatcccagttcggattgcaggctgaaacccgcctgtatgaagttggaatcgctagtaatcgcggatcagcatgccgcggtgaatacgttcccgggccttgtacacaccgcccgtcacaccatgagagtcgggaacacccgaagtccgtagcctaac

SEQ ID NO: 229 - DNA, 1347 bp, Artificial Sequence
  STR00086.1 Collinsella_aerofaciens_strain_JCM_10188_16S_ribosomal_RNA
gtggtgagcggcgaacgggtgagtaacacgtaggttatctgcccatcagacggggacaacgattggaaacgatcgctaataccggataggacgaaagtttaaaggtgcttcggcaccactgatggatgagcctgcggcgcattagctagttggtagggtaaaggcctaccaaggcgacgatgcgtagccgacctgagagggtgaacggccacactgggactgagacacggcccagactcctacgggaggcagcagtagggaatcttcggcaatgggcgaaagcctgaccgagcaacgccgcgtgaatgatgaaggccttcgggttgtaaaattctgttataagggaagaatggctctagtaggaaatggctagagtgtgacggtaccttatgagaaagccacggctaactacgtgccagcagccgcggtaatacgtaggtggcgagcgttatccggaattattgggcgtaaagagcgcgcaggtggttgattaagtctgatgtgaaagcccacggcttaaccgtggagggtcattggaaactggtcaacttgagtgcagaagagggaagtggaattccatgtgtagcggtgaaatgcgtagagatatggaggaacaccagtggcgaaggcggcttcctggtctgtaactgacactgaggcgcgaaagcgtggggagcaaacaggattagataccctggtagtccacgccgtaaacgatgagtgctaagtgttgggggtcgaacctcagtgctgaagttaacgcattaagcactccgcctggggagtacggtcgcaagactgaaactcaaaggaattgacggggacccgcacaagcggtggagcatgtggtttaattcgaagcaacgcgaagaaccttaccaggtcttgacataccagtgaccgtcctagagataggattttcccttcggggacaatggatacaggtggtgcatggttgtcgtcagctcgtgtcgtgagatgttgggttaagtcccgcaacgagcgcaacccctgtcgttagttgccagcattcagttggggactctaacgagactgccagtgacaaactggaggaaggtggggatgacgtcaaatcatcatgccccttatgacctgggctacacacgtgctacaatggttggtacaaagagaagcgaagcggtgacgtggagcaaacctcataaagccaatctcagttcggattgtaggctgcaactcgcctacatgaagttggaatcgctagtaatcgcgaatcagcatgtcgcggtgaatacgttcccgggtcttgtacacaccgcccgtcacaccacgagagtttacaacacccgaagtcagtggcctaaccgc

SEQ ID NO: 230 - DNA, 1331 bp, Artificial Sequence
  STR00049.1 Collinsella_aerofaciens_strain_JCM_10188_16S_ribosomal_RNA
  misc_feature (108)..(108): n is a, c, g, or t
  misc_feature (1320)..(1320): n is a, c, g, or t
acatgaagtggcgaacgggtgagtaacacgtgaccaacctgcccccctctccgggacaaccttgggaaaccgaggctaataccggatactccctcccctgctcctggnggggtcgggaaagcccaggcggagggggatggggtcgcggcccattaggtagtaggcggggtaacggcccacctagcccgcgatgggtagccgggttgagagaccgaccggccacattgggactgagatacggcccagactcctacgggaggcagcagtggggaattttgcgcaatgggggaaaccctgacgcagcaacgccgcgtgcgggacgacggccttcgggttgtaaaccgctttcagcagggaagaaattcgacggtaccttgcagaagaagctccggctaactacgtgccagcagccgcggtaatacgtagggagcgagcgttatccggattcattgggcgtaaagagcgcgtaggcggcctctcaagcgggatctctaatccgagggctcaacccccggccggatcccgaactgggaggctcgagttcggtagaggcaggcggaattcccggtgtagcggtggaatgcgcagatatcgggaagaacaccgatggcgaaggcagcctgctgggccgcaactgacgctgaggcgcgaaagctaggggagcgaacaggattagataccctggtagtcctagccgtaaacgatggatactaggtgtggggggctccgccctccgtgccgcagccaacgcattaagtatcccgcctggggagtacggccgcaaggctaaaactcaaaggaattgacgggggcccgcacaagcagcggagcatgtggcttaattcgaagcaacgcgaagaaccttaccagggcttgacatggacgtgaagcccggggaaacccggtggccgagaggagcgtccgcaggtggtgcatggctgtcgtcagctcgtgtcgtgagatgttgggttaagtcccgcaacgagcgcaacccctgccccatgttgccagcattaggttggggactcatgggggactgccggcgtcaagccggaggaaggtggggacgacgtcaagtcatcatgccctttatgccctgggctgcacacgtgctacaatggccggtacaacgggctgcgagaccgcgaggtcgagcgaatccctcaaagccggccccagttcggatcggaggctgcaacccgcctccgtgaagtcggagttgctagtaatcgcggatcagcatgccgcggtgaatacgttcccgggccttgtacacaccgcccgtcacaccacccgagtcgtctgcacccgaagccgccntccgaacccgc

SEQ ID NO: 231 - DNA, 1352 bp, Artificial Sequence
  STR00012.6 Collinsella_aerofaciens_strain_JCM_10188_16S_ribosomal_RNA
agcttgcttccaaagagacttagtggcgaacgggtgagtaacacgtaggtaacctgcccatgtgtccgggataactgctggaaacggtagctaaaaccggataggtatacagagcgcatgctcagtatattaaagcgcccttcaaggcgtgaacatggatggacctgcggcgcattagctagttggtgaggtaacggcccaccaaggcaatgatgcgtagccggcctgagagggtaaacggccacattgggactgagacacggcccaaactcctacgggaggcagcagtagggaattttcgtcaatgggggaaaccctgaacgagcaatgccgcgtgagtgaagaaggtcttcggatcgtaaagctctgttgtaagtgaagaacggctcatagaggaaatgctatgggagtgacggtagcttaccagaaagccacggctaactacgtgccagcagccgcggtaatacgtaggtggcaagcgttatccggaatcattgggcgtaaagggtgcgtaggtggcgtactaagtctgtagtaaaaggcaatggctcaaccattgtaagctatggaaactggtatgctggagtgcagaagagggcgatggaattccatgtgtagcggtaaaatgcgtagatatatggaggaacaccagtggcgaaggcggtcgcctggtctgtaactgacactgaggcacgaaagcgtggggagcaaataggattagataccctagtagtccacgccgtaaacgatgagaactaagtgttggaggaattcagtgctgcagttaacgcaataagttctccgcctggggagtatgcacgcaagtgtgaaactcaaaggaattgacgggggcccgcacaagcggtggagtatgtggtttaattcgaagcaacgcgaagaaccttaccaggccttgacatggaaacaaataccctagagatagggggataattatggatcacacaggtggtgcatggttgtcgtcagctcgtgtcgtgagatgttgggttaagtcccgcaacgagcgcaacccttgtcgcatgttaccagcatcaagttggggactcatgcgagactgccggtgacaaaccggaggaaggtggggatgacgtcaaatcatcatgccccttatggcctgggctacacacgtactacaatggcgaccacaaagagcagcgacacagtgatgtgaagcgaatctcataaaggtcgtctcagttcggattgaagtctgcaactcgacttcatgaagtcggaatcgctagtaatcgcagatcagcatgctgcggtgaatacgttctcgggccttgtacacaccgcccgtcaaaccatgggagtcagtaatacccgaa

SEQ ID NO: 232 - DNA, 1322 bp, Artificial Sequence
  STR00015 Collinsella_aerofaciens_strain_JCM_10188_16S_ribosomal_RNA
cggcggacgggtgagtaacgcgtgggtaacctgcctcatacacatggataacataccgaaaggtatgctaatacaggataacataagagattcgcatgtttctcttatcaaagctccggcggtatgagatggacccgcgtctgattagctagttggtaaggtaatggcttaccaaggcgacgatcagtagccgacctgagagggtgatcggccacattggaactgagacacggtccaaactcctacgggaggcagcagtggggaatattgcacaatgggcgaaagcctgatgcagcaacgccgcgtgagtgatgaaggccttcgggtcgtaaaactctgtcctcaaggaagataatgacggtacttgaggaggaagccccggctaactacgtgccagcagccgcggtaatacgtagggggctagcgttatccggatttactgggcgtaaagggtgcgtaggtggtttcttaagtcaggagtgaaaggctacggcttaaccgtagtaagctcttgaaactgggaaacttgagtgcaggagaggaaagtggaattcctagtgtagcggtgaaatgcgtagatattaggaggaacaccagtagcgaaggcggctttctggactgtaactgacactgaggcacgaaagcgtggggagcaaacaggattagataccctggtagtccacgccgtaaacgatgagtactaggtgtcgggggttacccccctcggtgccgcagctaacgcattaagtactccgcctggggagtacgctcgcaagagtgaaactcaaaggaattgacggggacccgcacaagtagcggagcatgtggtttaattcgaagcaacgcgaagaaccttacctaagcttgacatccttttgaccgatgcctaatcgcatttttcccttcggggacagaagtgacaggtggtgcatggttgtcgtcagctcgtgtcgtgagatgttgggttaagtcccgcaacgagcgcaacccttgcctttagttgccagcattaagttgggcactctagagggactgccagggataacctggaggaaggtggggatgacgtcaaatcatcatgccccttatgcttagggctacacacgtgctacaatgggtggtacagagggcagccaagtcgtgaggccgagctaatcccttaaagccattctcagttcggattgtaggctgaaactcgcctacatgaagctggagttactagtaatcgcagatcagaatgctgcggtgaatgcgttcccgggtcttgtacacaccgcccgtcacaccacggaagttgggggcgcccgaagccacttagctaa

SEQ ID NO: 233 - DNA, 1364 bp, Artificial Sequence
  STR00076.6 Collinsella_aerofaciens_strain_JCM_10188_16S_ribosomal_RNA
gtcgagcgaagcacttaagtggatctcttcggattgaaacttatttgactgagcggcggacgggtgagtaacgcgtgggtaacctgcctcatacagggggataacagttagaaatggctgctaataccgcataagcgcacaggaccgcatggtctggtgtgaaaaactccggtggtatgagatggacccgcgtctgattagctagttggaggggtaacggcccaccaaggcgacgatcagtagccggcctgagagggtgaacggccacattgggactgagacacggcccagactcctacgggaggcagcagtggggaatattgcacaatgggggaaaccctgatgcagcgacgccgcgtgaaggaagaagtatctcggtatgtaaacttctatcagcagggaagaaaatgacggtacctgactaagaagccccggctaactacgtgccagcagccgcggtaatacgtagggggcaagcgttatccggatttactgggtgtaaagggagcgtagacggaagagcaagtctgatgtgaaaggctggggcttaaccccaggactgcattggaaactgtttttctagagtgccggagaggtaagcggaattcctagtgtagcggtgaaatgcgtagatattaggaggaacaccagtggcgaaggcggcttactggacggtaactgacgttgaggctcgaaagcgtggggagcaaacaggattagataccctggtagtccacgccgtaaacgatgaatactaggtgtcgggtggcaaagccattcggtgccgcagcaaacgcaataagtattccacctggggagtacgttcgcaagaatgaaactcaaaggaattgacggggacccgcacaagcggtggagcatgtggtttaattcgaagcaacgcgaagaaccttaccaagtcttgacatccctctgaccggcccgtaacggggccttcccttcggggcagaggagacaggtggtgcatggttgtcgtcagctcgtgtcgtgagatgttgggttaagtcccgcaacgagcgcaacccctatccttagtagccagcaggtgaagctgggcactctagggagactgccggggataacccggaggaaggcggggacgacgtcaaatcatcatgccccttatgatttgggctacacacgtgctacaatggcgtaaacaaagggaagcgagacagtgatgttgagcaaatcccaaaaataacgtcccagttcggactgcagtctgcaactcgactgcacgaagctggaatcgctagtaatcgcgaatcagaatgtcgcggtgaatacgttcccgggtcttgtacacaccgcccgtcacaccatgggagtcagtaacgcccgaa

SEQ ID NO: 234 - DNA, 1382 bp, Artificial Sequence
  STR00087 Collinsella_aerofaciens_strain_JCM_10188_16S_ribosomal_RNA
tcgagcgaagcgctttacttagatttcttcggattgaagagttttgcgactgagcggcggacgggtgagtaacgcgtgggtaacctgcctcatacagggggataacagttagaaatgactgctaataccgcataagaccacggtaccgcatggtacagtgggaaaaactccggtggtatgagatggacccgcgtctgattagctagttggtaaggtaacggcttaccaaggcgacgatcagtagccgacctgagagggtgaccggccacattgggactgagacacggcccaaactcctacgggaggcagcagtggggaatattgcacaatgggggaaaccctgatgcagcgacgccgcgtgaaggatgaagtatttcggtatgtaaacttctatcagcagggaagaaaatgacggtacctgactaagaagccccgggctaactacgtgccagcagccgcggtaatacgtagggggcaagcgttatccggatttactgggtgtaaagggagcgtagacggttatgtaagtctgatgtgaaaacccggggctcaaccccgggactgcattggaaactatgtaactagagtgtcggagaggtaagtggaattcctagtgtagcggtgaaatgcgtagatattaggaggaacaccagtggcgaaggcggcttactggacgatgactgacgttgaggctcgaaagcgtggggagcaaacaggattagataccctggtagtccacgccgtaaacgatgcatactaggtgtcgggtggcaaagccattcggtgccgcagcaaacgcaataagtatgccacctggggagtacgttcgcaagaatgaaactcaaaggaattgacggggacccgcacaagcggtggagcatgtggtttaattcgaagcaacgcgaagaaccttacctgctcttgacatccccctgaccggcgcgtaatggtgcctttccttcgggacaggggagacaggtggtgcatggttgtcgtcagctcgtgtcgtgagatgttgggttaagtcccgcaacgagcgcaacccttatctttagtagccagcggttcggccgggcactctagagagactgccagggataacctggaggaaggtggggatgacgtcaaatcatcatgccccttatgagcagggctacacacgtgctacaatggcgtaaacaaagggaggcgaagccgcgaggtggagcaaatcccaaaaataacgtctcagttcggattgtagtctgcaactcgactacatgaagctggaatcgctagtaatcgcgaatcagaatgtcgcggtgaatacgttcccgggtcttgtacacaccgcccgtcacaccatgggagttggtaacgcccgaagtcagtgacccaaccgt

SEQ ID NO: 235 - DNA, 1342 bp, Artificial Sequence
  STR00096.6 Collinsella_aerofaciens_strain_JCM_10188_16S_ribosomal_RNA
agtgttgtgactgagcggcggacgggtgagtaacgcgtgggtaacctgcctcatacagggggataacagttagaaatgactgctaataccgtataagaccacggtgccgcatggcacagtggtaaaaactccggtggtatgagatggacccgcgtctgattagcttgttggtaaggtaacggcttaccaaggcgacgatcagtagccgacctgagagggtgaccggccacattgggactgagacacggcccaaactcctacgggaggcagcagtggggaatattgcacaatgggggaaaccctgatgcagcgacgccgcgtgaaggatgaagtatttcggtatgtaaacttctatcagcagggaagaaaatgacggtacctgactaagaagccccggctaactacgtgccagcagccgcggtaatacgtagggggcaagcgttatccggatttactgggtgtaaagggagcgtagacggtgatgcaagtctgatgtgaaaacccggggctcaaccccgggactgcattggaaactgtgtgactagagtgtcggagaggtaagtggaattcctagtgtagcggtgaaatgcgtagatattaggaggaacaccagtggcgaaggcggcttactggacgatgactgacgttgaggctcgaaagcgtggggagcaaacaggattagataccctggtagtccacgccgtaaacgatgaatactaggtgtcgggtggcaaagccattcggtgccgcagcaaacgcagtaagtattccacctggggagtacgttcgcaagaatgaaactcaaaggaattgacggggacccgcacaagcggtggagcatgtggtttaattcgaagcaacgcgaagaaccttacctgctcttgacatcccgctgaccggccagtaatgtggccttcccttcggggcagtggagacaggtggtgcatggttgtcgtcagctcgtgtcgtgagatgttgggttaagtcccgcaacgagcgcaacccttatctttagtagccagcggtcaggccgggcactctagagagactgccagggataacctggaggaaggtggggatgacgtcaaatcatcatgccccttatgagcagggctacacacgtgctacaatggcgtaaacaaagggaggcaatactgtgaagtggagcaaatcccaaaaataacgtctcagttcggattgtagtctgcaactcgactacatgaagctggaatcgctagtaatcgcgaatcagaatgtcgcggtgaatacgttcccgggtcttgtacacaccgcccgtcacaccatgggagttggtaacgcccgaagtcagtgacccaaccgc

SEQ ID NO: 236 - DNA, 1368 bp, Artificial Sequence
  STR00095 Collinsella_aerofaciens_strain_JCM_10188_16S_ribosomal_RNA
cacccctgacggagttttcggacaacgaaagggaatgcttagtggcggacgggtgagtaacgcgtgagtaacctgccttggagtggggaataacagccggaaacggctgctaataccgcatgatgtatctggatcgcatggttctggataccaaagatttatcgctctgagatggactcgcgtctgattagctagttggtgaggtaatggctcaccaaggcgacgatcagtagccggactgagaggttggccggccacattgggactgagacacggcccagactcctacgggaggcagcagtggggaatattgggcaatgggcgaaagcctgacccagcaacgccgcgtgaaggaagaaggccctcgggttgtaaacttcttttgtcagggacgaagcaagtgacggtacctgacgaataagccacggctaactacgtgccagcagccgcggtaatacgtaggtggcaagcgttatccggatttactgggtgtaaagggcgtgtaggcgggagtgcaagtcagatgtgaaaactatgggctcaacccatagcctgcatttgaaactgtacttcttgagtgatggagaggcaggcggaattccctgtgtagcggtgaaatgcgtagatatagggaggaacaccagtggcgaaggcggcctgctggacattaactgacgctgaggcgcgaaagcgtggggagcaaacaggattagataccctggtagtccacgccgtaaacgatggatactaggtgtggggggtctgaccccctccgtgccgcagttaacacaataagtatcccacctggggagtacgatcgcaaggttgaaactcaaaggaattgacgggggcccgcacaagcggtggagtatgtggtttaattcgaagcaacgcgaagaaccttaccaggacttgacatcctactaacgaagcagagatgcataaggtgcccttcggggaaagtagagacaggtggtgcatggttgtcgtcagctcgtgtcgtgagatgttggggttaagtcccgcaacgagcgcaacccttattgttagttgctacgcaagagcactctagcgagactgccgttgacaaaacggaggaaggtggggacgacgtcaaatcatcatgccccttatgtcctgggccacacacgtactacaatggcggtcaacagagggaagcaaagccgcgaggtggagcaaatccctaaaagccgtcccagttcggattgcaggctgaaactcgcctgtatgaagtcggaatcgctagtaatcgcggatcagcatgccgcggtgaatacgttcccgggccttgtacacaccgcccgtcacaccatgagagtcgggaacacccgaagtccgtagcctaac

SEQ ID NO: 237 - DNA, 1367 bp, Artificial Sequence
  STR00088.1 Collinsella_aerofaciens_strain_JCM_10188_16S_ribosomal_RNA
gcgaaccacttcggtggtgagcggcgaacgggtgagtaacacgtaggttatctgcccatcagacggggacaacgattggaaacgatcgctaataccggataggacgaaagtttaaaggtgcttcggcaccactgatggatgagcctgcggcgcattagctagttggtagggtaaaggcctaccaaggcgacgatgcgtagccgacctgagagggtgaacggccacactgggactgagacacggcccagactcctacgggaggcagcagtagggaatcttcggcaatgggcgaaagcctgaccgagcaacgccgcgtgaatgatgaaggccttcgggttgtaaaattctgttataagggaagaatggctctagtaggaaatggctagagtgtgacggtaccttatgagaaagccacggctaactacgtgccagcagccgcggtaatacgtaggtggcgagcgttatccggaattattgggcgtaaagagcgcgcaggtggttgattaagtctgatgtgaaagcccacggcttaaccgtggagggtcattggaaactggtcaacttgagtgcagaagagggaagtggaattccatgtgtagcggtgaaatgcgtagagatatggaggaacaccagtggcgaaggcggcttcctggtctgtaactgacactgaggcgcgaaagcgtggggagcaaacaggattagataccctggtagtccacgccgtaaacgatgagtgctaagtgttgggggtcgaacctcagtgctgaagttaacgcattaagcactccgcctggggagtacggtcgcaagactgaaactcaaaggaattgacggggacccgcacaagcggtggagcatgtggtttaattcgaagcaacgcgaagaaccttaccaggtcttgacataccagtgaccgtcctagagataggattttcccttcggggaaagcgcacggcgtagccgtggggggtcattggaaactggtcaacttgagtggggtaaagtcccgcaacgagcgcaacccctgtcgttagttgccagcattcagttggggactctaacgagactgccagtgacaaactggaggaaggtggggatgacgtcaaatcatcatgccccttatgacctgggctacacacgtgctacaatggttggtacaaagagaagcgaagcggtgacgtggagcaaacctcataaagccaatctcagttcggattgtaggctgcaactcgcctacatgaagttggaatcgctagtaatcgcgaatcagcatgtcgcggtgaatacgttcccgggtcttgtacacaccgcccgtcacaccacgagagtttacaacacccgaagtcagtggcctaaccgcaaggagg

SEQ ID NO: 238 - DNA, 1341 bp, Artificial Sequence
  STR00088 Collinsella_aerofaciens_strain_JCM_10188_16S_ribosomal_RNA
agcggcgaacgggtgagtaacacgtaggttatctgcccatcagacggggacaacgattggaaacgatcgctaataccggataggacgaaagtttaaaggtgcttcggcaccactgatggatgagcctgcggcgcattagctagttggtagggtaaaggcctaccaaggcgacgatgcgtagccgacctgagagggtgaacggccacactgggactgagacacggcccagactcctacgggaggcagcagtagggaatcttcggcaatgggcgaaagcctgaccgagcaacgccgcgtgaatgatgaaggccttcgggttgtaaaattctgttataagggaagaatggctctagtaggaaatggctagagtgtgacggtaccttatgagaaagccacggctaactacgtgccagcagccgcggtaatacgtaggtggcgagcgttatccggaattattgggcgtaaagagcgcgcaggtggttgattaagtctgatgtgaaagcccacggcttaaccgtggagggtcattggaaactggtcaacttgagtgcagaagagggaagtggaattccatgtgtagcggtgaaatgcgtagagatatggaggaacaccagtggcgaaggcggcttcctggtctgtaactgacactgaggcgcgaaagcgtggggagcaaacaggattagataccctggtagtccacgccgtaaacgatgagtgctaagtgttgggggtcgaacctcagtgctgaagttaacgcattaagcactccgcctggggagtacggtcgcaagactgaaactcaaaggaattgacggggacccgcacaagcggtggagcatgtggtttaattcgaagcaacgcgaagaaccttaccaggtcttgacataccagtgaccgtcctagagataggattttcccttcggggacaatggatacaggtggtgcatggttgtcgtcagctcgtgtcgtgagatgttgggttaagtcccgcaacgagcgcaacccctgtcgttagttgccagcattcagttggggactctaacgagactgccagtgacaaactggaggaaggtggggatgacgtcaaatcatcatgccccttatgacctgggctacacacgtgctacaatggttggtacaaagagaagcgaagcggtgacgtggagcaaacctcataaagccaatctcagttcggattgtaggctgcaactcgcctacatgaagttggaatcgctagtaatcgcgaatcagcatgtcgcggtgaatacgttcccgggtcttgtacacaccgcccgtcacaccacgagagtttacaacacccgaagtcagtggcctaaccgc

SEQ ID NO: 239 - DNA, 1367 bp, Artificial Sequence; identical to SEQ ID NO: 237
  STR00088.2 Collinsella_aerofaciens_strain_JCM_10188_16S_ribosomal_RNA

SEQ ID NO: 240 - DNA, 1341 bp, Artificial Sequence; identical to SEQ ID NO: 238
  STR00088.3 Collinsella_aerofaciens_strain_JCM_10188_16S_ribosomal_RNA

SEQ ID NO: 241 - DNA, 1527 bp, Artificial Sequence
  STR00010 Collinsella_aerofaciens_strain_JCM_10188_16S_ribosomal_RNA
tcagagagtttgatcctggctcaggatgaacgctggcggcgtgcttaacacatgcaagtcgaacgggaattactttattgaaacttcggtcgatttaatttaattctagtggcggacgggtgagtaacgcgtgggtaacctgccttatacagggggataacagtcagaaatggctgctaataccgcataagcgcacagagctgcatggctcagtgtgaaaaactccggtggtataagatggacccgcgttggattagctagttggtggggtaacggcccaccaaggcgacgatccatagccggcctgagagggtgaacggccacattgggactgagacacggcccagactcctacgggaggcagcagtggggaatattgcacaatgggggaaaccctgatgcagcgacgccgcgtgaaggaagaagtatctcggtatgtaaacttctatcagcagggaagatagtgacggtacctgactaagaagccccggctaactacgtgccagcagccgcggtaatacgtagggggcaagcgttatccggatttactgggtgtaaagggagcgtagacggtgtggcaagtctgatgtgaaaggcatgggctcaacctgtggactgcattggaaactgtcatacttgagtgccggaggggtaagcggaattcctagtgtagcggtgaaatgcgtagatattaggaggaacaccagtggcgaaggcggcttactggacggtaactgacgttgaggctcgaaagcgtggggagcaaacaggattagataccctggtagtccacgccgtaaacgatgaatactaggtgtcgggtggcagagccattcggtgccgtcgcaaacgcagtaagtattccacctggggagtacgttcgcaagaatgaaactcaaaggaattgacggggacccgcacaagcggtggagcatgtggtttaattcgaagcaacgcgaagaaccttaccaagtcttgacatccgcctgactgatccttaaccggatctttccttcgggacaggcgagacaggtggtgcatggttgtcgtcagctcgtgtcgtgagatgttgggttaagtcccgcaacgagcgcaacccctatcctcagtagccagcatttaaggtgggcactctggggagactgccagggataacctggaggaaggcggggatgacgtcaaatcatcatgccccttatgatttgggctacacacgtgctacaatggcgtaaacaaagggaagcgagattgtgagatggagcaaatcccaaaaataacgtcccagttcggactgtagtctgcaacccgactacacgaagctggaatcgctagtaatcgcggatcagaatgccgcggtgaatacgttcccgggtcttgtacacaccgcccgtcacaccatgggagtcagtaacgcccgaagtcagtgacctaactgcaaagaaggagctgccgaaggcgggaccgatgactggggtgaagtcgtaacaaggtagccgtatcggaaggtgcggctggatcacctccttt

SEQ ID NO: 242 - DNA, 1527 bp, Artificial Sequence
  STR00010.1 Collinsella_aerofaciens_strain_JCM_10188_16S_ribosomal_RNA
tcagagagtttgatcctggctcaggatgaacgctggcggcgtgcttaacacatgcaagtcgaacgggaaatatttcattgagacttcggtggatttgatctatttctagtggcggacgggtgagtaacgcgtgggtaacctgccttatacagggggataacagtcagaaatggctgctaataccgcataagcgcacagagctgcatggctcagtgtgaaaaactccggtggtataagatggacccgcgttggattagctagttggtggggtaacggcccaccaaggcgacgatccatagccggcctgagagggtgaacggccacattgggactgagacacggcccagactcctacgggaggcagcagtggggaatattgcacaatgggggaaaccctgatgcagcgacgccgcgtgaaggaagaagtatctcggtatgtaaacttctatcagcagggaagatagtgacggtacctgactaagaagccccggctaactacgtgccagcagccgcggtaatacgtagggggcaagcgttatccggatttactgggtgtaaagggagcgtagacggtgtggcaagtctgatgtgaaaggcatgggctcaacctgtggactgcattggaaactgtcatacttgagtgccggaggggtaagcggaattcctagtgtagcggtgaaatgcgtagatattaggaggaacaccagtggcgaaggcggcttactggacggtaactgacgttgaggctcgaaagcgtggggagcaaacaggattagataccctggtagtccacgccgtaaacgatgaatactaggtgtcgggtggcagagccattcggtgccgtcgcaaacgcagtaagtattccacctggggagtacgttcgcaagaatgaaactcaaaggaattgacggggacccgcacaagcggtggagcatgtggtttaattcgaagcaacgcgaagaaccttaccaagtcttgacatccgcctgactgatccttaaccggatctttccttcgggacaggcgagacaggtggtgcatggttgtcgtcagctcgtgtcgtgagatgttgggttaagtcccgcaacgagcgcaacccctatcctcagtagccagcatttaaggtgggcactctggggagactgccagggataacctggaggaaggcggggatgacgtcaaatcatcatgccccttatgatttgggctacacacgtgctacaatggcgtaaacaaagggaagcgagattgtgagatggagcaaatcccaaaaataacgtcccagttcggactgtagtctgcaacccgactacacgaagctggaatcgctagtaatcgcggatcagaatgccgcggtgaatacgttcccgggtcttgtacacaccgcccgtcacaccatgggagtcagtaacgcccgaagtcagtgacctaaccgaaagggaggagctgccgaaggcgggaccgatgactggggtgaagtcgtaacaaggtagccgtatcggaaggtgcggctggatcacctccttt

SEQ ID NO: 243 - DNA, 1527 bp, Artificial Sequence
  STR00010.2 Collinsella_aerofaciens_strain_JCM_10188_16S_ribosomal_RNA
tcagagagtttgatcctggctcaggatgaacgctggcggcgtgcttaacacatgcaagtcgaacgggaattactttattgaaacttcggtcgatttaatttaattctagtggcggacgggtgagtaacgcgtgggtaacctgccttatacagggggataacagtcagaaatggctgctaataccgcataagcgcacagagctgcatggctcagtgtgaaaaactccggtggtataagatggacccgcgttggattagctagttggtggggtaacggcccaccaaggcgacgatccatagccggcctgagagggtgaacggccacattgggactgagacacggcccagactcctacgggaggcagcagtggggaatattgcacaatgggggaaaccctgatgcagcgacgccgcgtgaaggaagaagtatctcggtatgtaaacttctatcagcagggaagatagtgacggtacctgactaagaagccccggctaactacgtgccagcagccgcggtaatacgtagggggcaagcgttatccggatttactgggtgtaaagggagcgtagacggtgtggcaagtctgatgtgaaaggcatgggctcaacctgtggactgcattggaaactgtcatacttgagtgccggaggggtaagcggaattcctagtgtagcggtgaaatgcgtagatattaggaggaacaccagtggcgaaggcggcttactggacggtaactgacgttgaggctcgaaagcgtggggagcaaacaggattagataccctggtagtccacgccgtaaacgatgaatactaggtgtcgggtggcagagccattcggtgccgtcgcaaacgcagtaagtattccacctggggagtacgttcgcaagaatgaaactcaaaggaattgacggggacccgcacaagcggtggagcatgtggtttaattcgaagcaacgcgaagaaccttaccaagtcttgacatccgcctgactgatccttaaccggatctttccttcgggacaggcgagacaggtggtgcatggttgtcgtcagctcgtgtcgtgagatgttgggttaagtcccgcaacgagcgcaacccctatcctcagtagccagcatttaaggtgggcactctggggagactgccagggataacctggaggaaggcggggatgacgtcaaatcatcatgccccttatgatttgggctacacacgtgctacaatggcgtaaacaaagggaagcgagattgtgagatggagcaaatcccaaaaataacgtcccagttcggactgtagtctgcaacccgactacacgaagctggaatcgctagtaatcgcggatcagaatgccgcggtgaatacgttcccgggtcttgtacacaccgcccgtcacaccatgggagtcagtaacgcccgaagtcagtgacctaaccgaaagggaggagctgccgaaggcgggaccgatgactggggtgaagtcgtaacaaggtagccgtatcggaaggtgcggctggatcacctccttt

SEQ ID NO: 244 - DNA, 1526 bp, Artificial Sequence
  STR00010.3 Collinsella_aerofaciens_strain_JCM_10188_16S_ribosomal_RNA
cagagagtttgatcctggctcaggatgaacgctggcggcgtgcttaacacatgcaagtcgaacgggaaatacttcattgagacttcggtggatttgatttatttctagtggcggacgggtgagtaacgcgtgggtaacctgccttatacagggggataacagtcagaaatggctgctaataccgcataagcgcacagagctgcatggctcagtgtgaaaaactccggtggtataagatggacccgcgttggattagctagttggtggggtaacggcccaccaaggcgacgatccatagccggcctgagagggtgaacggccacattgggactgagacacggcccagactcctacgggaggcagcagtggggaatattgcacaatgggggaaaccctgatgcagcgacgccgcgtgaaggaagaagtatctcggtatgtaaacttctatcagcagggaagatagtgacggtacctgactaagaagccccggctaactacgtgccagcagccgcggtaatacgtagggggcaagcgttatccggatttactgggtgtaaagggagcgtagacggtgtggcaagtctgatgtgaaaggcatgggctcaacctgtggactgcattggaaactgtcatacttgagtgccggaggggtaagcggaattcctagtgtagcggtgaaatgcgtagatattaggaggaacaccagtggcgaaggcggcttactggacggtaactgacgttgaggctcgaaagcgtggggagcaaacaggattagataccctggtagtccacgccgtaaacgatgaatactaggtgtcgggtggcagagccattcggtgccgtcgcaaacgcagtaagtattccacctggggagtacgttcgcaagaatgaaactcaaaggaattgacggggacccgcacaagcggtggagcatgtggtttaattcgaagcaacgcgaagaaccttaccaagtcttgacatccgcctgactgatccttaaccggatctttccttcgggacaggcgagacaggtggtgcatggttgtcgtcagctcgtgtcgtgagatgttgggttaagtcccgcaacgagcgcaacccctatcctcagtagccagcatttaaggtgggcactctggggagactgccagggataacctggaggaaggcggggatgacgtcaaatcatcatgccccttatgatttgggctacacacgtgctacaatggcgtaaacaaagggaagcgagattgtgagatggagcaaatcccaaaaataacgtcccagttcggactgtagtctgcaacccgactacacgaagctggaatcgctagtaatcgcggatcagaatgccgcggtgaatacgttcccgggtcttgtacacaccgcccgtcacaccatgggagtcagtaacgcccgaagtcagtgacctaactgcaaagaaggagctgccgaaggcgggaccgatgactggggtgaagtcgtaacaaggtagccgtatcggaaggtgcggctggatcacctccttt

SEQ ID NO: 245 - DNA, 1526 bp, Artificial Sequence
  STR00010.4 Collinsella_aerofaciens_strain_JCM_10188_16S_ribosomal_RNA
cagagagtttgatcctggctcaggatgaacgctggcggcgtgcttaacacatgcaagtcgaacgggaattactttattgaaacttcggtcgatttaatttaattctagtggcggacgggtgagtaacgcgtgggtaacctgccttatacagggggataacagtcagaaatggctgctaataccgcataagcgcacagagctgcatggctcagtgtgaaaaactccggtggtataagatggacccgcgttggattagctagttggtggggtaacggcccaccaaggcgacgatccatagccggcctgagagggtgaacggccacattgggactgagacacggcccagactcctacgggaggcagcagtggggaatattgcacaatgggggaaaccctgatgcagcgacgccgcgtgaaggaagaagtatctcggtatgtaaacttctatcagcagggaagatagtgacggtacctgactaagaagccccggctaactacgtgccagcagccgcggtaatacgtagggggcaagcgttatccggatttactgggtgtaaagggagcgtagacggtgtggcaagtctgatgtgaaaggcatgggctcaacctgtggactgcattggaaactgtcatacttgagtgccggaggggtaagcggaattcctagtgtagcggtgaaatgcgtagatattaggaggaacaccagtggcgaaggcggcttactggacggtaactgacgttgaggctcgaaagcgtggggagcaaacaggattagataccctggtagtccacgccgtaaacgatgaatactaggtgtcgggtggcagagccattcggtgccgtcgcaaacgcagtaagtattccacctggggagtacgttcgcaagaatgaaactcaaaggaattgacggggacccgcacaagcggtggagcatgtggtttaattcgaagcaacgcgaagaaccttaccaagtcttgacatccgcctgactgatccttaaccggatctttccttcgggacaggcgagacaggtggtgcatggttgtcgtcagctcgtgtcgtgagatgttgggttaagtcccgcaacgagcgcaacccctatcctcagtagccagcatttaaggtgggcactctggggagactgccagggataacctggaggaaggcggggatgacgtcaaatcatcatgccccttatgatttgggctacacacgtgctacaatggcgtaaacaaagggaagcgagattgtgagatggagcaaatcccaaaaataacgtcccagttcggactgtagtctgcaacccgactacacgaagctggaatcgctagtaatcgcggatcagaatgccgcggtgaatacgttcccgggtcttgtacacaccgcccgtcacaccatgggagtcagtaacgcccgaagtcagtgacctaaccgaaagggaggagctgccgaaggcgggaccgatgactggggtgaagtcgtaacaaggtagccgtatcggaaggtgcggctggatcacctccttt

SEQ ID NO: 246 - DNA, 1527 bp, Artificial Sequence
  STR00010.5 Collinsella_aerofaciens_strain_JCM_10188_16S_ribosomal_RNA
tcagagagtttgatcctggctcaggatgaacgctggcggcgtgcttaacacatgcaagtcgaacgggaaatatttcattgagacttcggtggatttgatttatttctagtggcggacgggtgagtaacgcgtgggtaacctgccttatacagggggataacagtcagaaatggctgctaataccgcataagcgcacagagctgcatggctcagtgtgaaaaactccggtggtataagatggacccgcgttggattagctagttggtggggtaacggcccaccaaggcgacgatccatagccggcctgagagggtgaacggccacattgggactgagacacggcccagactcctacgggaggcagcagtggggaatattgcacaatgggggaaaccctgatgcagcgacgccgcgtgaaggaagaagtatctcggtatgtaaacttctatcagcagggaagatagtgacggtacctgactaagaagccccggctaactacgtgccagcagccgcggtaatacgtagggggcaagcgttatccggatttactgggtgtaaagggagcgtagacggtgtggcaagtctgatgtgaaaggcatgggctcaacctgtggactgcattggaaactgtcatacttgagtgccggaggggtaagcggaattcctagtgtagcggtgaaatgcgtagatattaggaggaacaccagtggcgaaggcggcttactggacggtaactgacgttgaggctcgaaagcgtggggagcaaacaggattagataccctggtagtccacgccgtaaacgatgaatactaggtgtcgggtggcagagccattcggtgccgtcgcaaacgcagtaagtattccacctggggagtacgttcgcaagaatgaaactcaaaggaattgacggggacccgcacaagcggtggagcatgtggtttaattcgaagcaacgcgaagaaccttaccaagtcttgacatccgcctgactgatccttaaccggatctttccttcgggacaggcgagacaggtggtgcatggttgtcgtcagctcgtgtcgtgagatgttgggttaagtcccgcaacgagcgcaacccctatcctcagtagccagcatttaaggtgggcactctggggagactgccagggataacctggaggaaggcggggatgacgtcaaatcatcatgccccttatgatttgggctacacacgtgctacaatggcgtaaacaaagggaagcgagattgtgagatggagcaaatcccaaaaataacgtcccagttcggactgtagtctgcaacccgactacacgaagctggaatcgctagtaatcgcggatcagaatgccgcggtgaatacgttcccgggtcttgtacacaccgcccgtcacaccatgggagtcagtaacgcccgaagtcagtgacctaactgcaaagaaggagctgccgaaggcgggaccgatgactggggtgaagtcgtaacaaggtagccgtatcggaaggtgcggctggatcacctccttt

SEQ ID NO: 247 - DNA, 1527 bp, Artificial Sequence; identical to SEQ ID NO: 242
  STR00010.8 Collinsella_aerofaciens_strain_JCM_10188_16S_ribosomal_RNA

SEQ ID NO: 248 - DNA, 1528 bp, Artificial Sequence
  STR00012 Collinsella_aerofaciens_strain_JCM_10188_16S_ribosomal_RNA
agagtttgatcctggctcaggatgaacgctggcggcatgcctaatacatgcaagtcgaacgaagtttcgaggaagcttgcttccaaagagacttagtggcgaacgggtgagtaacacgtaggtaacctgcccatgtgtccgggataactgctggaaacggtagctaaaaccggataggtatacagagcgcatgctcagtatattaaagcgcccttcaaggcgtgaacatggatggacctgcggcgcattagctagttggtgaggtaacggcccaccaaggcaatgatgcgtagccggcctgagagggtaaacggccacattgggactgagacacggcccaaactcctacgggaggcagcagtagggaattttcgtcaatgggggaaaccctgaacgagcaatgccgcgtgagtgaagaaggtcttcggatcgtaaagctctgttgtaagtgaagaacggctcatagaggaaatgctatgggagtgacggtagcttaccagaaagccacggctaactacgtgccagcagccgcggtaatacgtaggtggcaagcgttatccggaatcattgggcgtaaagggtgcgtaggtggcgtactaagtctgtagtaaaaggcaatggctcaaccattgtaagctatggaaactggtatgctggagtgcagaagagggcgatggaattccatgtgtagcggtaaaatgcgtagatatatggaggaacaccagtggcgaaggcggtcgcctggtctgtaactgacactgaggcacgaaagcgtggggagcaaataggattagataccctagtagtccacgccgtaaacgatgagaactaagtgttggaggaattcagtgctgcagttaacgcaataagttctccgcctggggagtatgcacgcaagtgtgaaactcaaaggaattgacgggggcccgcacaagcggtggagtatgtggtttaattcgaagcaacgcgaagaaccttaccaggccttgacatggaaacaaataccctagagatagggggataattatggatcacacaggtggtgcatggttgtcgtcagctcgtgtcgtgagatgttgggttaagtcccgcaacgagcgcaacccttgtcgcatgttaccagcatcaagttggggactcatgcgagactgccggtgacaaaccggaggaaggtggggatgacgtcaaatcatcatgccccttatggcctgggctacacacgtactacaatggcgaccacaaagagcagcgacacagtgatgtgaagcgaatctcataaaggtcgtctcagttcggattgaagtctgcaactcgacttcatgaagtcggaatcgctagtaatcgcagatcagcatgctgcggtgaatacgttctcgggccttgtacacaccgcccgtcaaaccatgggagtcagtaatacccgaagccggtggcataaccgtaaggagtgagccgtcgaaggtaggaccgatgactggggttaagtcgtaacaaggtatccctacgggaacgtggggatggatcacct

SEQ ID NO: 249 - DNA, 1528 bp, Artificial Sequence
  STR00012.1 Collinsella_aerofaciens_strain_JCM_10188_16S_ribosomal_RNA
agagtttgatcctggctcaggatgaacgctggcggcatgcctaatacatgcaagtcgaacgaagtttcgaggaagcttgcttccaaagagacttagtggcgaacgggtgagtaacacgtaggtaacctgcccatgtgtccgggataactgctggaaacggtagctaaaaccggataggtatacagagcgcatgctcagtatattaaagcgcccttcaaggcgtgaacatggatggacctgcggcgcattagctagttggtgaggtaacggcccaccaaggcaatgatgcgtagccggcctgagagggtaaacggccacattgggactgagacacggcccaaactcctacgggaggcagcagtagggaattttcgtcaatgggggaaaccctgaacgagcaatgccgcgtgagtgaagaaggtcttcggatcgtaaagctctgttgtaagtgaagaacggctcatagaggaaatgctatgggagtgacggtagcttaccagaaagccacggctaactacgtgccagcagccgcggtaatacgtaggtggcaagcgttatccggaatcattgggcgtaaagggtgcgtaggtggcgtactaagtctgtagtaaaaggcaatggctcaaccattgtaagctatggaaactggtatgctggagtgcagaagagggcgatggaattccatgtgtagcggtaaaatgcgtagatatatggaggaacaccagtggcgaaggcggtcgcctggtctgtaactgacactgaggcacgaaagcgtggggagcaaataggattagataccctagtagtccacgccgtaaacgatgagaactaagtgttggagaaattcagtgctgcagttaacgcaataagttctccgcctggggagtatgcacgcaagtgtgaaactcaaaggaattgacgggggcccgcacaagcggtggagtatgtggtttaattcgaagcaacgcgaagaaccttaccaggccttgacatggaaacaaataccctagagatagggggataattatggatcacacaggtggtgcatggttgtcgtcagctcgtgtcgtgagatgttgggttaagtcccgcaacgagcgcaacccttgtcgcatgttaccagcatcaagttggggactcatgcgagactgccggtgacaaaccggaggaaggtggggatgacgtcaaatcatcatgccccttatggcctgggctacacacgtactacaatggcgaccacaaagagcagcgacacagtgatgtgaagcgaatctcataaaggccgtctcagttcggattgaagtctgcaactcgacttcatgaagtcggaatcgctagtaatcgcagatcagcatgctgcggtgaatacgttctcgggccttgtacacaccgcccgtcaaaccatgggagtcagtaatacccgaagccggtggcataaccgtaaggagtgagccgtcgaaggtaggaccgatgactggggttaagtcgtaacaaggtatccctacgggaacgtggggatggatcacct

SEQ ID NO: 250 - DNA, 1528 bp, Artificial Sequence; identical to SEQ ID NO: 248
  STR00012.2 Collinsella_aerofaciens_strain_JCM_10188_16S_ribosomal_RNA

SEQ ID NO: 251 - DNA, 1528 bp, Artificial Sequence
  STR00012.3 Collinsella_aerofaciens_strain_JCM_10188_16S_ribosomal_RNA
agagtttgatcctggctcaggatgaacgctggcggcatgcctaatacatgcaagtcgaacgaagtttcgaggaagcttgcttccaaagagacttagtggcgaacgggtgagtaacacgtaggtaacctgcccatgtgtccgggataactgctggaaacggtagctaaaaccggataggtatacagagcgcatgctcagtatattaaagcgcccatcaaggcgtgaacatggatggacctgcggcgcattagctagttggtgaggtaacggcccaccaaggcgatgatgcgtagccggcctgagagggtaaacggccacattgggactgagacacggcccaaactcctacgggaggcagcagtagggaattttcgtcaatgggggaaaccctgaacgagcaatgccgcgtgagtgaagaaggtcttcggatcgtaaagctctgttgtaagtgaagaacggctcatagaggaaatgctatgggagtgacggtagcttaccagaaagccacggctaactacgtgccagcagccgcggtaatacgtaggtggcaagcgttatccggaatcattgggcgtaaagggtgcgtaggtggcgtactaagtctgtagtaaaaggcaatggctcaaccattgtaagctatggaaactggtatgctggagtgcagaagagggcgatggaattccatgtgtagcggtaaaatgcgtagatatatggaggaacaccagtggcgaaggcggtcgcctggtctgtaactgacactgaggcacgaaagcgtggggagcaaataggattagataccctagtagtccacgccgtaaacgatgagaactaagtgttggaggaattcagtgctgcagttaacgcaataagttctccgcctggggagtatgcacgcaagtgtgaaactcaaaggaattgacgggggcccgcacaagcggtggagtatgtggtttaattcgaagcaacgcgaagaaccttaccaggccttgacatggaaacaaataccctagagatagggggataattatggatcacacaggtggtgcatggttgtcgtcagctcgtgtcgtgagatgttgggttaagtcccgcaacgagcgcaacccttgtcgcatgttaccagcatcaagttggggactcatgcgagactgccggtgacaaaccggaggaaggtggggatgacgtcaaatcatcatgccccttatggcctgggctacacacgtactacaatggcgaccacaaagagcagcgacacagtgatgtgaagcgaatctcataaaggtcgtctcagttcggattgaagtctgcaactcgacttcatgaagtcggaatcgctagtaatcgcagatcagcatgctgcggtgaatacgttctcgggccttgtacacaccgcccgtcaaaccatgggagtcagtaatacccgaagccggtggcataaccgcaaggagtgagccgtcgaaggtaggaccgatgactggggttaagtcgtaacaaggtatccctacgggaacgtggggatggatcacct

SEQ ID NO: 252 - DNA, 1528 bp, Artificial Sequence
  STR00012.4 Collinsella_aerofaciens_strain_JCM_10188_16S_ribosomal_RNA
agagtttgatcctggctcaggatgaacgctggcggcatgcctaatacatgcaagtcgaacgaagactctaggaagcttgcttccaaagagacttagtggcgaacgggtgagtaacacgtaggtaacctgcccatgtgtccgggataactgctggaaacggtagctaaaaccggataggtatacagagcgcatgctcagtatattaaagcgcccttcaaggcgtgaacatggatggacctgcggcgcattagctagttggtgaggtaacggcccaccaaggcaatgatgcgtagccggcctgagagggtaaacggccacattgggactgagacacggcccaaactcctacgggaggcagcagtagggaattttcgtcaatgggggaaaccctgaacgagcaatgccgcgtgagtgaagaaggtcttcggatcgtaaagctctgttgtaagtgaagaacggctcatagaggaaatgctatgggagtgacggtagcttaccagaaagccacggctaactacgtgccagcagccgcggtaatacgtaggtggcaagcgttatccggaatcattgggcgtaaagggtgcgtaggtggcgtactaagtctgtagtaaaaggcaatggctcaaccattgtaagctatggaaactggtatgctggagtgcagaagagggcgatggaattccatgtgtagcggtaaaatgcgtagatatatggaggaacaccagtggcgaaggcggtcgcctggtctgtaactgacactgaggcacgaaagcgtggggagcaaataggattagataccctagtagtccacgccgtaaacgatgagaactaagtgttggaggaattcagtgctgcagttaacgcaataagttctccgcctggggagtatgcacgcaagtgtgaaactcaaaggaattgacgggggcccgcacaagcggtggagtatgtggtttaattcgaagcaacgcgaagaaccttaccaggccttgacatggaaacaaataccctagagatagggggataattatggatcacacaggtggtgcatggttgtcgtcagctcgtgtcgtgagatgttgggttaagtcccgcaacgagcgcaacccttgtcgcatgttaccagcatcaagttggggactcatgcgagactgccggtgacaaaccggaggaaggtggggatgacgtcaaatcatcatgccccttatggcctgggctacacacgtactacaatggcgaccacaaagagcagcgacacagtgatgtgaagcgaatctcataaaggtcgtctcagttcggattgaagtctgcaactcgacttcatgaagtcggaatcgctagtaatcgcagatcagcatgctgcggtgaatacgttctcgggccttgtacacaccgcccgtcaaaccatgggagtcagtaatacccgaagccggtggcataaccgtaaggagtgagccgtcgaaggtaggaccgatgactggggttaagtcgtaacaaggtatccctacgggaacgtggggatggatcacct

SEQ ID NO: 253 - DNA, 1522 bp, Artificial Sequence
  STR00022 Collinsella_aerofaciens_strain_JCM_10188_16S_ribosomal_RNA
agagtttgatcctggctcaggatgaacgctggcggcgtgcctaacacatgcaagtcgaacgaagcaattaaaatgaagttttcggatggatttttaattgactgagtggcggacgggtgagtaacgcgtggataacctgcctcacactgggggataacagttagaaatgactgctaataccgcataagcgcacagtaccgcatggtacagtgtgaaaaactccggtggtgtgagatggatccgcgtctgattagccagttggcggggtaacggcccaccaaagcgacgatcagtagccgacctgagagggtgaccggccacattgggactgagacacggcccaaactcctacgggaggcagcagtggggaatattgcacaatgggcgaaagcctgatgcagcgacgccgcgtgagtgaagaagtatttcggtatgtaaagctctatcagcagggaagaaaatgacggtacctgactaagaagccccggctaactacgtgccagcagccgcggtaatacgtagggggcaagcgttatccggatttactgggtgtaaagggagcgtagacggcgaagcaagtctgaagtgaaaacccagggctcaaccctgggactgctttggaaactgttttgctagagtgtcggagaggtaagtggaattcctagtgtagcggtgaaatgcgtagatattaggaggaacaccagtggcgaaggcggcttactggacgataactgacgttgaggctcgaaagcgtggggagcaaacaggattagataccctggtagtccacgccgtaaacgatgaatgctaggtgttggggggcaaagcccttcggtgccgtcgcaaacgcagtaagcattccacctggggagtacgttcgcaagaatgaaactcaaaggaattgacggggacccgcacaagcggtggagcatgtggtttaattcgaagcaacgcgaagaaccttaccaagtcttgacatcctcttgaccggcgtgtaacggcgccttcccttcggggcaagagagacaggtggtgcatggttgtcgtcagctcgtgtcgtgagatgttgggttaagtcccgcaacgagcgcaacccttatccttagtagccagcaggtagagctgggcactctagggagactgccagggataacctggaggaaggtggggatgacgtcaaatcatcatgccccttatgatttgggctacacacgtgctacaatggcgtaaacaaagggaggcaagacagtgatgtggagcaaatcccaaaaataacgtcccagttcggactgtagtctgcaacccgactacacgaagctggaatcgctagtaatcgcgaatcagaatgtcgcggtgaatacgttcccgggtcttgtacacaccgcccgtcacaccatgggagtcagcaacgcccgaagtcagtgacccaactcgcaagagagggagctgccgaaggcggggcaggtaactggggtgaagtcgtaacaaggtagccgtatcggaaggtgcggctggatcacct

SEQ ID NO: 254 - DNA, 1522 bp, Artificial Sequence
  STR00022.1 Collinsella_aerofaciens_strain_JCM_10188_16S_ribosomal_RNA
agagtttgatcctggctcaggatgaacgctggcggcgtgcctaacacatgcaagtcgaacgaagcaattaaaatgaagttttcggatggatttttaattgactgagtggcggacgggtgagtaacgcgtggataacctgcctcacactgggggataacagttagaaatgactgctaataccgcataagcgcacagtaccgcatggtacggtgtgaaaaactccggtggtgtgagatggatccgcgtctgattagccagttggcggggtaacggcccaccaaagcgacgatcagtagccgacctgagagggtgaccggccacattgggactgagacacggcccaaactcctacgggaggcagcagtggggaatattgcacaatgggcgaaagcctgatgcagcgacgccgcgtgagtgaagaagtatttcggtatgtaaagctctatcagcagggaagaaaatgacggtacctgactaagaagccccggctaactacgtgccagcagccgcggtaatacgtagggggcaagcgttatccggatttactgggtgtaaagggagcgtagacggcgaagcaagtctgaagtgaaaacccagggctcaaccctgggactgctttggaaactgttttgctagagtgtcggagaggtaagtggaattcctagtgtagcggtgaaatgcgtagatattaggaggaacaccagtggcgaaggcggcttactggacgataactgacgttgaggctcgaaagcgtggggagcaaacaggattagataccctggtagtccacgccgtaaacgatgaatgctaggtgttggggggcaaagcccttcggtgccgtcgcaaacgcagtaagcattccacctggggagtacgttcgcaagaatgaaactcaaaggaattgacggggacccgcacaagcggtggagcatgtggtttaattcgaagcaacgcgaagaaccttaccaagtcttgacatcctcttgaccggcgtgtaacggcgccttcccttcggggcaagagagacaggtggtgcatggttgtcgtcagctcgtgtcgtgagatgttgggttaagtcccgcaacgagcgcaacccttatccttagtagccagcaggtaaagctgggcactctagggagactgccagggataacctggaggaaggtggggatgacgtcaaatcatcatgccccttatgatttgggctacacacgtgctacaatggcgtaaacaaagggaagcaagacagtgatgtggagcaaatcccaaaaataacgtcccagttcggactgtagtctgcaacccgactacacgaagctggaatcgctagtaatcgcgaatcagaatgtcgcggtgaatacgttcccgggtcttgtacacaccgcccgtcacaccatgggagtcagcaacgcccgaagtcagtgacccaactcgcaagagagggagctgccgaaggcggggcaggtaactggggtgaagtcgtaacaaggtagccgtatcggaaggtgcggctggatcacct

SEQ ID NO: 255 - DNA, 1522 bp, Artificial Sequence; identical to SEQ ID NO: 254
  STR00022.2 Collinsella_aerofaciens_strain_JCM_10188_16S_ribosomal_RNA

SEQ ID NO: 256 - DNA, 1520 bp, Artificial Sequence
  STR00022.3 Collinsella_aerofaciens_strain_JCM_10188_16S_ribosomal_RNA
agagtttgatcctggctcaggatgaacgctggcggcgtgcctaacacatgcaagtcgaacgaagcaattgaaggaagttttcggatggaattcgattgactgagtggcggacgggtgagtaacgcgtggataacctgcctcacactgggggataacagttagaaatgactgctaataccgcataagcgcacagtaccgcatggtacagtgtgaaaaactccggtggtgtgagatggatccgcgtctgattagccagttggcggggtaacggcccaccaaagcgacgatcagtagccgacctgagagggtgaccggccacattgggactgagacacggcccaaactcctacgggaggcagcagtggggaatattgcacaatgggcgaaagcctgatgcagcgacgccgcgtgagtgaagaagtatttcggtatgtaaagctctatcagcagggaagaaaatgacggtacctgactaagaagccccggctaactacgtgccagcagccgcggtaatacgtagggggcaagcgttatccggatttactgggtgtaaagggagcgtagacggcgaagcaagtctgaagtgaaaacccagggctcaaccctgggactgctttggaaactgttttgctagagtgtcggagaggtaagtggaattcctagtgtagcggtgaaatgcgtagatattaggaggaacaccagtggcgaaggcggcttactggacgataactgacgttgaggctcgaaagcgtggggagcaaacaggattagataccctggtagtccacgccgtaaacgatgaatgctaggtgttggggggcaaagcccttcggtgccgtcgcaaacgcagtaagcattccacctggggagtacgttcgcaagaatgaaactcaaaggaattgacggggacccgcacaagcggtggagcatgtggtttaattcgaagcaacgcgaagaaccttaccaagtcttgacatcctcttgaccggcgtgtaacggcgccttcccttcggggcaagagagacaggtggtgcatggttgtcgtcagctcgtgtcgtgagatgttgggttaagtcccgcaacgagcgcaacccttatccttagtagccagcaggtagagctgggcactctagggagactgccagggataacctggaggaaggtggggatgacgtcaaatcatcatgccccttatgatttgggctacacacgtgctacaatggcgtaaacaaagggaagcaagacagtgatgtggagcaaatcccaaaaataacgtcccagttcggactgtagtctgcaacccgactacacgaagctggaatcgctagtaatcgcgaatcagaatgtcgcggtgaatacgttcccgggtcttgtacacaccgcccgtcacaccatgggagtcagcaacgcccgaagtcagtgacccaactcgcaagagagggagctgccgaaggcggggcaggtaactggggtgaagtcgtaacaaggtagccgtatcggaaggtgcggctggatcacct

SEQ ID NO: 257 - DNA, 1520 bp, Artificial Sequence; identical to SEQ ID NO: 256
  STR00022.4 [Clostridium]_bolteae_strain_JCM_12243_16S_ribosomal_RNA

SEQ ID NO: 258 - DNA, 1522 bp, Artificial Sequence
  STR00025 Eubacterium_callanderi_strain_DSM_3662_16S_ribosomal_RNA
tattgagagtttgatcctggctcaggacgaacgctggcggtatgcttaacacatgcaagtcgaacgagaagatcagttaagaaccttcgggggaataagtgattggaaagtggcgaacgggtgagtaacgcgtgggtaacctgccctatggaaaggaatagcctcgggaaactgggagtaaagccttatattatggagagatcgcatggtcatttcatgaaaactccggtgccataggatggacccgcgtcccattagctagttggtgagataacagcccaccaaggcgacgatgggtaaccggtctgagagggcgaacggtcacactggaactgagacacggtccagactcctacgggaggcagcagtggggaatattgcgcaatgggggcaaccctgacgcagcaataccgcgtgagtgaagaaggttttcggatcgtaaagctctgttattggggaagaaaacatgacggtacccaatgaggaagtcccggctaactacgtgccagcagccgcggtaatacgtaggggacaagcgttgtccggaatgactgggcgtaaagggcgcgtaggcggtctgataagtcagatgtgaaaggtaccggctcaaccggtgacgtgcatttgaaactgtcagacttgagtattggagaggcaagtggaattcctagtgtagcggtgaaatgcgtagatattaggaggaacaccagtggcgaaggcggcttgctggacaaatactgacgctgaggtgcgaaagcgtggggagcgaacaggattagataccctggtagtccacgccgtaaacgatgaatgctaggtgttggggaaactcagtgccgcagttaacacaataagcattccgcctggggagtacgaccgcaaggttgaaactcaaaggaattgacggggacccgcacaagcagcggagcatgtggtttaattcgaagcaacgcgaagaaccttaccaggtcttgacatcctctgacaatcccagagatgggacgtttccttcgggaacagagagacaggtggtgcatggttgtcgtcagctcgtgtcgtgagatgttgggttaagtcccgcaacgagcgcaacccctgcctttagttgccagcattgagttgggcactctagagggactgccgtagacaatacggaggaaggtggggatgacgtcaaatcatcatgccccttatgacctgggctacacacgtgctacaatggtctgaacagagggccgcgaaaccgcgaggtgaagcaaatcccttaaaacagatcccagttcggattgcaggctgcaactcgcctgcatgaagttggagttgctagtaatcgcggatcagaatgccgcggtgaatgcgttcccgggtcttgtacacaccgcccgtcacaccacgagagttggcaacacccgaagcctgtgagagaaccgcaaggactcagcagtcgaaggtggggctagtaattggggtgaagtcgtaacaaggtagccgtatcggaaggtgcggctggatcacctccttt

SEQ ID NO: 259 - DNA, 1522 bp, Artificial Sequence; identical to SEQ ID NO: 258
  STR00025.1 Eubacterium_callanderi_strain_DSM_3662_16S_ribosomal_RNA

SEQ ID NO: 260 - DNA, 1522 bp, Artificial Sequence; identical to SEQ ID NO: 258
  STR00025.2 Eubacterium_callanderi_strain_DSM_3662_16S_ribosomal_RNA

SEQ ID NO: 261 - DNA, 1522 bp, Artificial Sequence; identical to SEQ ID NO: 258
  STR00025.3 Eubacterium_callanderi_strain_DSM_3662_16S_ribosomal_RNA

SEQ ID NO: 262 - DNA, 1522 bp, Artificial Sequence; identical to SEQ ID NO: 258
  STR00025.4 Eubacterium_callanderi_strain_DSM_3662_16S_ribosomal_RNA

SEQ ID NO: 263 - DNA, 1520 bp, Artificial Sequence
  STR00075 Flavonifractor_plautii_strain_265_16S_ribosomal_RNA
agagtttgatcctggctcaggatgaacgctggcggcgtgcttaacacatgcaagtcgaacggggtgctcatgacggaggattcgtccaacggattgagttacctagtggcggacgggtgagtaacgcgtgaggaacctgccttggagaggggaataacactccgaaaggagtgctaataccgcatgatgcagttgggtcgcatggctctgactgccaaagatttatcgctctgagatggcctcgcgtctgattagctagtaggcggggtaacggcccacctaggcgacgatcagtagccggactgagaggttgaccggccacattgggactgagacacggcccagactcctacgggaggcagcagtggggaatattgggcaatgggcgcaagcctgacccagcaacgccgcgtgaaggaagaaggctttcgggttgtaaacttcttttgtcggggacgaaacaaatgacggtacccgacgaataagccacggctaactacgtgccagcagccgcggtaatacgtaggtggcaagcgttatccggatttactgggtgtaaagggcgtgtaggcgggattgcaagtcagatgtgaaaactgggggctcaacctccagcctgcatttgaaactgtagttcttgagtgctggagaggcaatcggaattccgtgtgtagcggtgaaatgcgtagatatacggaggaacaccagtggcgaaggcggattgctggacagtaactgacgctgaggcgcgaaagcgtggggagcaaacaggattagataccctggtagtccacgccgtaaacgatggatactaggtgtggggggtctgaccccctccgtgccgcagttaacacaataagtatcccacctggggagtacgatcgcaaggttgaaactcaaaggaattgacgggggcccgcacaagcggtggagtatgtggtttaattcgaagcaacgcgaagaaccttaccagggcttgacatcccactaacgaagcagagatgcattaggtgcccttcggggaaagtggagacaggtggtgcatggttgtcgtcagctcgtgtcgtgagatgttgggttaagtcccgcaacgagcgcaacccttattgttagttgctacgcaagagcactctagcgagactgccgttgacaaaacggaggaaggtggggacgacgtcaaatcatcatgccccttatgtcctgggccacacacgtactacaatggtggttaacagagggaggcaataccgcgaggtggagcaaatccctaaaagccatcccagttcggattgcaggctgaaacccgcctgtatgaagttggaatcgctagtaatcgcggatcagcatgccgcggtgaatacgttcccgggccttgtacacaccgcccgtcacaccatgagagtcgggaacacccgaagtccgtagcctaaccgcaaggagggcgcggccgaaggtgggttcgataattggggtgaagtcgtaacaaggtagccgtatcggaaggtgcggctggatcacct

SEQ ID NO: 264 - DNA, 1520 bp, Artificial Sequence; identical to SEQ ID NO: 263
  STR00075.1 Flavonifractor_plautii_strain_265_16S_ribosomal_RNA

SEQ ID NO: 265 - DNA, 1520 bp, Artificial Sequence; identical to SEQ ID NO: 263
  STR00075.2 Flavonifractor_plautii_strain_265_16S_ribosomal_RNA

SEQ ID NO: 266 - DNA, 1521 bp, Artificial Sequence
  STR00076 Blautia_hominis_strain_KB1_16S_ribosomal_RNA
agagtttgatcctggctcaggatgaacgctggcggcgtgcttaacacatgcaagtcgagcgaagcacttaagtggatctcttcggattgaaacttatttgactgagcggcggacgggtgagtaacgcgtgggtaacctgcctcatacagggggataacagttagaaatggctgctaataccgcataagcgcacaggaccgcatggtctggtgtgaaaaactccggtggtatgagatggacccgcgtctgattagctagttggaggggtaacggcccaccaaggcgacgatcagtagccggcctgagagggtgaacggccacattgggactgagacacggcccagactcctacgggaggcagcagtggggaatattgcacaatgggggaaaccctgatgcagcgacgccgcgtgaaggaagaagtatctcggtatgtaaacttctatcagcagggaagaaaatgacggtacctgactaagaagccccggctaactacgtgccagcagccgcggtaatacgtagggggcaagcgttatccggatttactgggtgtaaagggagcgtagacggaagagcaagtctgatgtgaaaggctggggcttaaccccaggactgcattggaaactgtttttctagagtgccggagaggtaagcggaattcctagtgtagcggtgaaatgcgtagatattaggaggaacaccagtggcgaaggcggcttactggacggtaactgacgttgaggctcgaaagcgtggggagcaaacaggattagataccctggtagtccacgccgtaaacgatgaatactaggtgtcgggtggcaaagccattcggtgccgcagcaaacgcaataagtattccacctggggagtacgttcgcaagaatgaaactcaaaggaattgacggggacccgcacaagcggtggagcatgtggtttaattcgaagcaacgcgaagaaccttaccaagtcttgacatccctctgaccggcccgtaacggggccttcccttcggggcagaggagacaggtggtgcatggttgtcgtcagctcgtgtcgtgagatgttgggttaagtcccgcaacgagcgcaacccctatccttagtagccagcaggtgaagctgggcactctagggagactgccggggataacccggaggaaggcggggacgacgtcaaatcatcatgccccttatgatttgggctacacacgtgctacaatggcgtaaacaaagggaagcgagacagcgatgttgagcaaatcccaaaaataacgtcccagttcggactgcagtctgcaactcgactgcacgaagctggaatcgctagtaatcgcgaatcagaatgtcgcggtgaatacgttcccgggtcttgtacacaccgcccgtcacaccatgggagtcagtaacgcccgaagtcagtgacccaaccttataggagggagctgccgaaggcgggaccgataactggggtgaagtcgtaacaaggtagccgtatcggaaggtgcggctggatcacct

SEQ ID NO: 267 - DNA, 1521 bp, Artificial Sequence
  STR00076.1 Blautia_hominis_strain_KB1_16S_ribosomal_RNA
agagtttgatcctggctcaggatgaacgctggcggcgtgcttaacacatgcaagtcgagcgaagcacttaagtggatctcttcggattgaaacttatttgactgagcggcggacgggtgagtaacgcgtgggtaacctgcctcatacagggggataacagttagaaatggctgctaataccgcataagcgcacaggaccgcatggtctggtgtgaaaaactccggtggtatgagatggacccgcgtctgattagctagttggaggggtaacggcccaccaaggcaacgatcagtagccggcctgagagggtgaacggccacattgggactgagacacggcccagactcctacgggaggcagcagtggggaatattgcacaatgggggaaaccctgatgcagcgacgccgcgtgaaggaagaagtatctcggtatgtaaacttctatcagcagggaagaaaatgacggtacctgactaagaagccccggctaactacgtgccagcagccgcggtaatacgtagggggcaagcgttatccggatttactgggtgtaaagggagcgtagacggaagagcaagtctgatgtgaaaggctggggcttaaccccaggactgcattggaaactgtttttctagagtgccggagaggtaagcggaattcctagtgtagcggtgaaatgcgtagatattaggaggaacaccagtggcgaaggcggcttactggacggtaactgacgttgaggctcgaaagcgtggggagcaaacaggattagataccctggtagtccacgccgtaaacgatgaatactaggtgtcgggtggcaaagccattcggtgccgcagcaaacgcaataagtattccacctggggagtacgttcgcaagaatgaaactcaaaggaattgacggggacccgcacaagcggtggagcatgtggtttaattcgaagcaacgcgaagaaccttaccaagtcttgacatccctctgaccggcccgtaacggggccttcccttcggggcagaggagacaggtggtgcatggttgtcgtcagctcgtgtcgtgagatgttgggttaagtcccgcaacgagcgcaacccctatccttagtagccagcaggtgaagctgggcactctagggagactgccggggataacccggaggaaggcggggacgacgtcaaatcatcatgccccttatgatttgggctacacacgtgctacaatggcgtaaacaaagggaagcgagacagtgatgttgagcaaatcccaaaaataacgtcccagttcggactgcagtctgcaactcgactgcacgaagctggaatcgctagtaatcgcgaatcagaatgtcgcggtgaatacgttcccgggtcttgtacacaccgcccgtcacaccatgggagtcagtaacgcccgaagtcagtgacccaaccttacaggagggagctgccgaaggcgggaccgataactggggtgaagtcgtaacaaggtagccgtatcggaaggtgcggctggatcacct

SEQ ID NO: 268 - DNA, 1521 bp, Artificial Sequence
  STR00076.2 Blautia_hominis_strain_KB1_16S_ribosomal_RNA
agagtttgatcctggctcaggatgaacgctggcggcgtgcttaacacatgcaagtcgagcgaagcacttaagtggatctcttcggattgaagcttatttgactgagcggcggacgggtgagtaacgcgtgggtaacctgcctcatacagggggataacagttagaaatggctgctaataccgcataagcgcacaggaccgcatggtctggtgtgaaaaactccggtggtatgagatggacccgcgtctgattagctagttggaggggtaacggcccaccaaggcgacgatcagtagccggcctgagagggtgaacggccacattgggactgagacacggcccagactcctacgggaggcagcagtggggaatattgcacaatgggggaaaccctgatgcagcgacgccgcgtgaaggaagaagtatctcggtatgtaaacttctatcagcagggaagaaaatgacggtacctgactaagaagccccggctaactacgtgccagcagccgcggtaatacgtagggggcaagcgttatccggatttactgggtgtaaagggagcgtagacggaagagcaagtctgatgtgaaaggctggggcttaaccccaggactgcattggaaactgtttttctagagtgccggagaggtaagcggaattcctagtgtagcggtgaaatgcgtagatattaggaggaacaccagtggcgaaggcggcttactggacggtaactgacgttgaggctcgaaagcgtggggagcaaacaggattagataccctggtagtccacgccgtaaacgatgaatactaggtgtcgggtggcaaagccattcggtgccgcagcaaacgcaataagtattccacctggggagtacgttcgcaagaatgaaactcaaaggaattgacggggacccgcacaagcggtggagcatgtggtttaattcgaagcaacgcgaagaaccttaccaagtcttgacatccctctgaccggcccgtaacggggccttcccttcggggcagaggagacaggtggtgcatggttgtcgtcagctcgtgtcgtgagatgttgggttaagtcccgcaacgagcgcaacccctatccttagtagccagcaggtgaagctgggcactctagggagactgccggggataacccggaggaaggcggggacgacgtcaaatcatcatgccccttatgatttgggctacacacgtgctacaatggcgtaaacaaagggaagcgagacagtgatgttgagcaaatcccaaaaataacgtcccagttcggactgcagtctgcaactcgactgcacgaagctggaatcgctagtaatcgcgaatcagaatgtcgcggtgaatacgttcccgggtcttgtacacaccgcccgtcacaccatgggagtcagtaacgcccgaagtcagtgacccaaccttacaggagggagctgccgaaggcgggaccgataactggggtgaagtcgtaacaaggtagccgtatcggaaggtgcggctggatcacct

SEQ ID NO: 269 - DNA, 1521 bp, Artificial Sequence; identical to SEQ ID NO: 266
  STR00076.3 Blautia_hominis_strain_KB1_16S_ribosomal_RNA

SEQ ID NO: 270 - DNA, 1521 bp, Artificial Sequence
  STR00076.4 Blautia_hominis_strain_KB1_16S_ribosomal_RNA
agagtttgatcctggctcaggatgaacgctggcggcgtgcttaacacatgcaagtcgagcgaagcacttaaacggatttcttcggattgaagtttttgtgactgagcggcggacgggtgagtaacgcgtgggtaacctgcctcatacagggggataacagttagaaatggctgctaataccgcataagcgcacaggaccgcatggtctggtgtgaaaaactccggtggtatgagatggacccgcgtctgattagctagttggaggggtaacggcccaccaaggcaacgatcagtagccggcctgagagggtgaacggccacattgggactgagacacggcccagactcctacgggaggcagcagtggggaatattgcacaatgggggaaaccctgatgcagcgacgccgcgtgaaggaagaagtatctcggtatgtaaacttctatcagcagggaagaaaatgacggtacctgactaagaagccccggctaactacgtgccagcagccgcggtaatacgtagggggcaagcgttatccggatttactgggtgtaaagggagcgtagacggaagagcaagtctgatgtgaaaggctggggcttaaccccaggactgcattggaaactgtttttctagagtgccggagaggtaagcggaattcctagtgtagcggtgaaatgcgtagatattaggaggaacaccagtggcgaaggcggcttactggacggtaactgacgttgaggctcgaaagcgtggggagcaaacaggattagataccctggtagtccacgccgtaaacgatgaatactaggtgtcgggtggcaaagccattcggtgccgcagcaaacgcaataagtattccacctggggagtacgttcgcaagaatgaaactcaaaggaattgacggggacccgcacaagcggtggagcatgtggtttaattcgaagcaacgcgaagaaccttaccaagtcttgacatccctctgaccggcccgtaacggggccttcccttcggggcagaggagacaggtggtgcatggttgtcgtcagctcgtgtcgtgagatgttgggttaagtcccgcaacgagcgcaacccctatccttagtagccagcaggtgaagctgggcactctagggagactgccggggataacccggaggaaggcggggacgacgtcaaatcatcatgccccttatgatttgggctacacacgtgctacaatggcgtaaacaaagggaagcgagacagtgatgttgagcaaatcccaaaaataacgtcccagttcggactgcagtctgcaactcgactgcacgaagctggaatcgctagtaatcgcgaatcagaatgtcgcggtgaatacgttcccgggtcttgtacacaccgcccgtcacaccatgggagtcagtaacgcccgaagtcagtgacccaaccttacaggagggagctgccgaaggcgggaccgataactggggtgaagtcgtaacaaggtagccgtatcggaaggtgcggctggatcacct

SEQ ID NO: 271 - DNA, 1521 bp, Artificial Sequence
  STR00081 Anaerotruncus_colihominis_strain_WAL_14565_16S_ribosomal_RNA
caaagagtttgatcctggctcaggacgaacgctggcggcgcgcctaacacatgcaagtcgaacggagtttacgttttgaagttttcggatggacgaatgtaagcttagtggcggacgggtgagtaacacgtgagcaacctgcctttcagagggggataacagccggaaacggctgctaataccgcatgatgttgcgggggcacatgcccctgcaaccaaaggagcaatccgctgaaagatgggctcgcgtccgattagccagttggcggggtaacggcccaccaaagcgacgatcggtagccggactgagaggttgaacggccacattgggactgagacacggcccagactcctacgggaggcagcagtgggggatattgcacaatgggcgaaagcctgatgcagcgacgccgcgtgagggaagacggtcttcggattgtaaacctctgtctttggggaagaaaatgacggtacccaaagaggaagctccggctaactacgtgccagcagccgcggtaatacgtagggagcaagcgttgtccggaattactgggtgtaaagggagcgtaggcgggatggcaagtagaatgttaaatccatcggctcaaccggtggctgcgttctaaactgccgttcttgagtgaagtagaggcaggcggaattcctagtgtagcggtgaaatgcgtagatattaggaggaacaccagtggcgaaggcggcctgctgggctttaactgacgctgaggctcgaaagcgtggggagcaaacaggattagataccctggtagtccacgccgtaaacgatgattactaggtgtggggggactgaccccttccgtgccgcagttaacacaataagtaatccacctggggagtacggccgcaaggttgaaactcaaaggaattgacgggggcccgcacaagcagtggagtatgtggtttaattcgaagcaacgcgaagaaccttaccaggtcttgacatcggatgcatagcctagagataggtgaagcccttcggggcatccagacaggtggtgcatggttgtcgtcagctcgtgtcgtgagatgttgggttaagtcccgcaacgagcgcaacccttattattagttgctacgcaagagcactctaatgagactgccgttgacaaaacggaggaaggtggggatgacgtcaaatcatcatgccccttatgacctgggctacacacgtactacaatggcactaaaacagagggcggcgacaccgcgaggtgaagcgaatcccgaaaaagtgtctcagttcagattgcaggctgcaacccgcctgcatgaagtcggaattgctagtaatcgcggatcagcatgccgcggtgaatacgttcccgggccttgtacacaccgcccgtcacaccatgggagtcggtaacacccgaagccagtagcctaaccgcaaggggggcgctgtcgaaggtgggattgatgactggggtgaagtcgtaacaaggtagccgtatcggaaggtgcggctggatcacctccttt

SEQ ID NO: 272 - DNA, 1521 bp, Artificial Sequence
  STR00081.1 Anaerotruncus_colihominis_strain_WAL_14565_16S_ribosomal_RNA
caaagagtttgatcctggctcaggacgaacgctggcggcgcgcctaacacatgcaagtcgaacggagcttacgttttgaagttttcggatggatgaatgtaagcttagtggcggacgggtgagtaacacgtgagcaacctgcctttcagagggggataacagccggaaacggctgctaataccgcatgatgttgcgggggcacatgcccctgcaaccaaaggagcaatccgctgaaagatgggctcgcgtccgattagccagttggcggggtaacggcccaccaaagcgacgatcggtagccggactgagaggttgaacggccacattgggactgagacacggcccagactcctacgggaggcagcagtgggggatattgcacaatgggcgaaagcctgatgcagcgacgccgcgtgagggaagacggtcttcggattgtaaacctctgtctttggggaagaaaatgacggtacccaaagaggaagctccggctaactacgtgccagcagccgcggtaatacgtagggagcaagcgttgtccggaattactgggtgtaaagggagcgtaggcgggatggcaagtagaatgttaaatccatcggctcaaccggtggctgcgttctaaactgccgttcttgagtgaagtagaggcaggcggaattcctagtgtagcggtgaaatgcgtagatattaggaggaacaccagtggcgaaggcggcctgctgggctttaactgacgctgaggctcgaaagcgtggggagcaaacaggattagataccctggtagtccacgccgtaaacgatgattactaggtgtggggggactgaccccttccgtgccgcagttaacacaataagtaatccacctggggagtacggccgcaaggttgaaactcaaaggaattgacgggggcccgcacaagcagtggagtatgtggtttaattcgaagcaacgcgaagaaccttaccaggtcttgacatcggatgcatagcctagagataggtgaagcccttcggggcatccagacaggtggtgcatggttgtcgtcagctcgtgtcgtgagatgttgggttaagtcccgcaacgagcgcaacccttattattagttgctacgcaagagcactctaatgagactgccgttgacaaaacggaggaaggtggggatgacgtcaaatcatcatgccccttatgacctgggctacacacgtactacaatggcactaaaacagagggcggcgacaccgcgaggtgaagcgaatcccgaaaaagtgtctcagttcagattgcaggctgcaacccgcctgcatgaagtcggaattgctagtaatcgcggatcagcatgccgcggtgaatacgttcccgggccttgtacacaccgcccgtcacaccatgggagtcggtaacacccgaagccagtagcctaaccgcaaggggggcgctgtcgaaggtgggattgatgactggggtgaagtcgtaacaaggtagccgtatcggaaggtgcggctggatcacctccttt

SEQ ID NO: 273 - DNA, 1521 bp, Artificial Sequence; identical to SEQ ID NO: 272
  STR00081.2 Anaerotruncus_colihominis_strain_WAL_14565_16S_ribosomal_RNA

SEQ ID NO: 274 - DNA, 1518 bp, Artificial Sequence
  STR00083 Murimonas_intestini_strain_SRB-530-5-H_16S_ribosomal_RNA
agagtttgatcctggctcaggatgaacgctggcggcgtgcttaacacatgcaagtcgagcggagtatttaaccggaagtcttcggatggaaagttagatacttagcggcggacgggtgagtaacgcgtgggcaacctgccccataccgggggataacagccagaaatggctgctaataccgcataagcgcacagcgccccatggcgcggtgtgaaaattccggtggtatgggatgggcccgcgtctgattaggtagttggcggggtaacggcccaccaagccgacgatcagtagccgacctgagagggtgaccggccacattgggactgagacacggcccaaactcctacgggaggcagcagtggggaatattgcacaatgggggaaaccctgatgcagcgacgccgcgtgagcgaagaagtatttcggtatgtaaagctctatcagcagggaagaaaatgacggtacctgactaagaagccccggctaactacgtgccagcagccgcggtaatacgtagggggcaagcgttatccggatttactgggtgtaaagggagcgtagacggccaggcaagtctgatgtgaaaggcaggggctcaacccctggactgcattggaaactgtcaggctggagtgccggagaggtaagcggaattcctagtgtagcggtgaaatgcgtagatattaggaggaacaccagtggcgaaggcggcttactggacggtaactgacgttgatgctcgaaagcgtggggagcaaacaggattagataccctggtagtccacgccgtaaacgatgaatactaggtgtcggggggcaaagcccttcggtgccgccgcaaacgcattaagtattccacctggggagtacgttcgcaagaatgaaactcaaaggaattgacggggacccgcacaagcggtggagcatgtggtttaattcgaagcaacgcgaagaaccttaccaagccttgacatcccattgaagccagagtaacgtctgggggccttcgggacaatggagacaggtggtgcatggttgtcgtcagctcgtgtcgtgagatgttgggttaagtcccgcaacgagcgcaacccttatcttcagtagccagcacgcgatggtgggcactctggagagactgccagggacaacctggaggaaggtggggatgacgtcaaatcatcatgccccttatggcttgggctacacacgtgctacaatggcgtaaacagagggaagcagccctgcgaaggtgagcgaatcccaaaaataacgtctcagttcggattgtagtctgcaactcgactacatgaagctggaatcgctagtaatcgcgaatcagaatgtcgcggtgaatacgttcccgggtcttgtacacaccgcccgtcacaccatgggagtcagtaacgcccgaagtcagtgacctaaccgaaaggaaggagctgccgaaggcgggactggtaactggggtgaagtcgtaacaaggtagccgtatcggaaggtgcggctggatcacct

SEQ ID NO: 275 - DNA, 1517 bp, Artificial Sequence
  STR00083.1 Murimonas_intestini_strain_SRB-530-5-H_16S_ribosomal_RNA
agagtttgatcctggctcaggatgaacgctggcggcgtgcttaacacatgcaagtcgagcggagtgtttaaccggaagtcttcggatggaaggttagatatttagcggcggacgggtgagtaacgcgtgggcaacctgccccataccgggggataacagccagaaatggctgctaataccgcataagcgcacagcgcctcatggcgcggtgtgaaaaactccggtggtatgggatgggcccgcgtctgattaggtagttggcggggtaacggcccaccaagccgacgatcagtagccgacctgagagggtgaccggccacattgggactgagacacggcccaaactcctacgggaggcagcagtggggaatattgcacaatgggggaaaccctgatgcagcgacgccgcgtgagcgaagaagtatttcggtatgtaaagctctatcagcagggaagaaaatgacggtacctgactaagaagccccggctaactacgtgccagcagccgcggtaatacgtagggggcaagcgttatccggatttactgggtgtaaagggagcgtagacggccaggcaagtctgatgtgaaaggcaggggctcaacccctggactgcattggaaactgtcaggctggagtgccggagaggtaagcggaattcctagtgtagcggtgaaatgcgtagatattaggaggaacaccagtggcgaaggcggcttactggacggtaactgacgttgatgctcgaaagcgtggggagcaaacaggattagataccctggtagtccacgccgtaaacgatgaatactaggtgtcgggggcaaagcccttcggtgccgctgcaaacgcattaagtattccacctggggagtacgttcgcaagaatgaaactcaaaggaattgacggggacccgcacaagcggtggagcatgtggtttaattcgaagcaacgcgaagaaccttaccaagccttgacatcccattgaagccagagtaacgtctgacggccttcgggacaatggagacaggtggtgcatggttgtcgtcagctcgtgtcgtgagatgttgggttaagtcccgcaacgagcgcaacccttatcttcagtagccagcacgcagaggtgggcactctggagagactgccagggacaacctggaggaaggtggggatgacgtcaaatcatcatgcccttatggcttgggctacacacgtgctacaatggcgtaaacagagggaagcagccctgcgaaggtgagcgaatcccaaaaataacgtctcagttcggattgtagtctgcaactcgactacatgaagctggaatcgctagtaatcgcgaatcagaatgtcgcggtgaatacgttcccgggtcttgtacacaccgcccgtcacaccatgggagtcagtaacgcccgaagtcagtgacctaaccgaaaggaaggagctgccgaaggcgggactggtaactggggtgaagtcgtaacaaggtagccgtatcggaaggtgcggctggatcacct

SEQ ID NO: 276 - DNA, 1519 bp, Artificial Sequence
  STR00083.2 Murimonas_intestini_strain_SRB-530-5-H_16S_ribosomal_RNA
agagtttgatcctggctcaggatgaacgctggcggcgtgcttaacacatgcaagtcgagcggagtatttaaacggaagtcttcggatggaagtttggatacttagcggcggacgggtgagtaacgcgtgggcaacctgccccataccgggggataacagccagaaatggctgctaataccgcataagcgcacagcgcctcatggcgcggtgtgaaaaactccggtggtatgggatgggcccgcgtctgattaggtagttggcggggtaacggcccaccaagccgacgatcagtagccgacctgagagggtgaccggccacattgggactgagacacggcccaaactcctacgggaggcagcagtggggaatattgcacaatgggggaaaccctgatgcagcgacgccgcgtgagcgaagaagtatttcggtatgtaaagctctatcagcagggaagaaaatgacggtacctgactaagaagccccggctaactacgtgccagcagccgcggtaatacgtagggggcaagcgttatccggatttactgggtgtaaagggagcgtagacggccaggcaagtctgatgtgaaaggcaggggctcaacccctggactgcattggaaactgtcaggctggagtgccggagaggtaagcggaattcctagtgtagcggtgaaatgcgtagatattaggaggaacaccagtggcgaaggcggcttactggacggtaactgacgttgatgctcgaaagcgtggggagcaaacaggattagataccctggtagtccacgccgtaaacgatgaatactaggtgtcggggggcaaagcccttcggtgccgccgcaaacgcattaagtattccacctggggagtacgttcgcaagaatgaaactcaaaggaattgacggggacccgcacaagcggtggagcatgtggtttaattcgaagcaacgcgaagaaccttaccaagccttgacatcccattgaagccagagtaacgtctgacggccttcgggacaatggagacaggtggtgcatggttgtcgtcagctcgtgtcgtgagatgttgggttaagtcccgcaacgagcgcaacccttatcttcagtagccagcacgcgatggtgggcactctggagagactgccagggacaacctggaggaaggtggggatgacgtcaaatcatcatgccccttatggcttgggctacacacgtgctacaatggcgtaaacagagggaagcagccctgcgaaggtgagcgaatcccaaaaataacgtctcagttcggattgtagtctgcaactcgactacatgaagctggaatcgctagtaatcgcgaatcagaatgtcgcggtgaatacgttcccgggtcttgtacacaccgcccgtcacaccatgggagtcagtaacgcccgaagtcagtgacctaaccgaaaggaaggagctgccgaaggcgggactggtaactggggtgaagtcgtaacaaggtagccgtatcggaaggtgcggctggatcacct

SEQ ID NO: 277 - DNA, 1518 bp, Artificial Sequence
  STR00083.3 Murimonas_intestini_strain_SRB-530-5-H_16S_ribosomal_RNA
agagtttgatcctggctcaggatgaacgctggcggcgtgcttaacacatgcaagtcgagcggagtatttaaacggaagtcttcggatggaagtttggatacttagcggcggacgggtgagtaacgcgtgggcaacctgccccataccgggggataacagccagaaatggctgctaataccgcataagcgcacagcgcctcatggcgcggtgtgaaaaactccggtggtatgggatgggcccgcgtctgattaggtagttggcggggtaacggcccaccaagccgacgatcagtagccgacctgagagggtgaccggccacattgggactgagacacggcccaaactcctacgggaggcagcagtggggaatattgcacaatgggggaaaccctgatgcagcgacgccgcgtgagcgaagaagtatttcggtatgtaaagctctatcagcagggaagaaaatgacggtacctgactaagaagccccggctaactacgtgccagcagccgcggtaatacgtagggggcaagcgttatccggatttactgggtgtaaagggagcgtagacggccaggcaagtctgatgtgaaaggcaggggctcaacccctggactgcattggaaactgtcaggctggagtgccggagaggtaagcggaattcctagtgtagcggtgaaatgcgtagatattaggaggaacaccagtggcgaaggcggcttactggacggtaactgacgttgatgctcgaaagcgtggggagcaaacaggattagataccctggtagtccacgccgtaaacgatgaatactaggtgtcgggggcaaagcccttcggtgccgccgcaaacgcattaagtattccacctggggagtacgttcgcaagaatgaaactcaaaggaattgacggggacccgcacaagcggtggagcatgtggtttaattcgaagcaacgcgaagaaccttaccaagccttgacatcccattgaagccagagtaacgtctgacggccttcgggacaatggagacaggtggtgcatggttgtcgtcagctcgtgtcgtgagatgttgggttaagtcccgcaacgagcgcaacccttatcttcagtagccagcacgcgatggtgggcactctggagagactgccagggacaacctggaggaaggtggggatgacgtcaaatcatcatgccccttatggcttgggctacacacgtgctacaatggcgtaaacagagggaagcagccctgcgaaggtgagcgaatcccaaaaataacgtctcagttcggattgtagtctgcaactcgactacatgaagctggaatcgctagtaatcgcgaatcagaatgtcgcggtgaatacgttcccgggtcttgtacacaccgcccgtcacaccatgggagtcagtaacgcccgaagtcagtgacctaaccgaaaggaaggagctgccgaaggcgggactggtaactggggtgaagtcgtaacaaggtagccgtatcggaaggtgcggctggatcacct

SEQ ID NO: 278 - DNA, 1515 bp, Artificial Sequence
  STR00083.4 Murimonas_intestini_strain_SRB-530-5-H_16S_ribosomal_RNA
agagtttgatcctggctcaggatgaacgctggcggcgtgcttaacacatgcaagtcgagcggagtatctaaacggaagtcttcggatggaaggttagatacttagcgcggacgggtgagtaacgcgtgggcaacctgccccataccgggggataacagccagaaatggctgctaataccgcataagcgcacagcgccccatggcgcggtgtgaaaaattccggtggtatgggatgggcccgcgtctgattaggtagttggcggggtaacggcccaccaagccgacgatcagtagccgacctgagagggtgaccggccacattgggactgagacacggcccaaactcctacgggaggcagcagtggggaatattgcacaatgggggaaaccctgatgcagcgacgccgcgtgagcgaagaagtatttcggtatgtaaagctctatcagcagggaagaaaatgacggtacctgactaagaagccccggctaactacgtgccagcagccgcggtaatacgtaggggcaagcgttatccggatttactgggtgtaaagggagcgtagacggccaggcaagtctgatgtgaaaggcaggggctcaacccctggactgcattggaaactgtcaggctggagtgccggagaggtaagcggaattcctagtgtagcggtgaaatgcgtagatattaggaggaacaccagtggcgaaggcggcttactggacggtaactgacgttgatgctcgaaagcgtgggagcaaacaggattagataccctggtagtccacgccgtaaacgatgaatactaggtgtcggggggcaaagcccttcggtgccgccgcaaacgcattaagtattccacctggggagtacgttcgcaagaatgaaactcaaaggaattgacggggacccgcacaagcggtggagcatgtggtttaattcgaagcaacgcgaagaaccttaccaagccttgacatcccattgaagccagagtaacgtctgacggccttcgggacaatggagacaggtggtgcatggttgtcgtcagctcgtgtcgtgagatgttgggttaagtcccgcaacgagcgcaacccttatcttcagtagccagcacgcagaggtgggcactctggagagactgccagggacaacctggaggaaggtggggatgacgtcaaatcatcatgccccttatggcttgggctacacacgtgctacaatggcgtaaacagagggaagcagccctgcgaaggtgagcgaatcccaaaataacgtctcagttcggattgtagtctgcaactcgactacatgaagctggaatcgctagtaatcgcgaatcagaatgtcgcggtgaatacgttcccgggtcttgtacacaccgcccgtcacaccatgggagtcagtaacgcccgaagtcagtgacctaaccgaaaggaaggagctgccgaaggcgggactggtaactggggtgaagtcgtaacaaggtagccgtatcggaaggtgcggctggatcacct

SEQ ID NO: 279 - DNA, 1524 bp, Artificial Sequence
  STR00092 Erysipelatoclostridium_ramosum_strain_JCM_1298_16S_ribosomal_RNA
aaaagagctaaacaaacgaagagttgtttaaataaacaatggagagtttgatcctggctcaggatgaacgctggcggcgtgcctaatacatgcaagtcgaacgcgagcacttgtgctcgagtggcgaacgggtgagtaatacataagtaacctgccctagacagggggataactattggaaacgatagctaagaccgcataggtacggacactgcatggtgaccgtattaaaagtgcctcaaagcactggtagaggatggacttatggcgcattagctggttggcggggtaacggcccaccaaggcgacgatgcgtagccgacctgagagggtgaccggccacactgggactgagacacggcccagactcctacgggaggcagcagtagggaattttcggcaatgggggaaaccctgaccgagcaacgccgcgtgaaggaagaaggttttcggattgtaaacttctgttataaaggaagaacggcggctacaggaaatggtagccgagtgacggtactttattagaaagccacggctaactacgtgccagcagccgcggtaatacgtaggtggcaagcgttatccggaattattgggcgtaaagagggagcaggcggcagcaagggtctgtggtgaaagcctgaagcttaacttcagtaagccatagaaaccaggcagctagagtgcaggagaggatcgtggaattccatgtgtagcggtgaaatgcgtagatatatggaggaacaccagtggcgaaggcgacgatctggcctgcaactgacgctcagtcccgaaagcgtggggagcaaataggattagataccctagtagtccacgccgtaaacgatgagtactaagtgttggatgtcaaagttcagtgctgcagttaacgcaataagtactccgcctgagtagtacgttcgcaagaatgaaactcaaaggaattgacgggggcccgcacaagcggtggagcatgtggtttaattcgaagcaacgcgaagaaccttaccaggtcttgacatactcataaaggctccagagatggagagatagctatatgagatacaggtggtgcatggttgtcgtcagctcgtgtcgtgagatgttgggttaagtcccgcaacgagcgcaacccttatcgttagttaccatcattaagttggggactctagcgagactgccagtgacaagctggaggaaggcggggatgacgtcaaatcatcatgccccttatgacctgggctacacacgtgctacaatggatggtgcagagggaagcgaagccgcgaggtgaagcaaaacccataaaaccattctcagttcggattgtagtctgcaactcgactacatgaagttggaatcgctagtaatcgcgaatcagcatgtcgcggtgaatacgttctcgggccttgtacacaccgcccgtcacaccacgagagttgataacacccgaagccggtggcctaaccgcaaggaaggagctgtctaaggtgggattgatgattggggtgaagtcgtaacaag

SEQ ID NO: 280 - DNA, 1524 bp, Artificial Sequence; identical to SEQ ID NO: 279
  STR00092.1 Erysipelatoclostridium_ramosum_strain_JCM_1298_16S_ribosomal_RNA

SEQ ID NO: 281 - DNA, 1523 bp, Artificial Sequence
  STR00092.2 Erysipelatoclostridium_ramosum_strain_JCM_1298_16S_ribosomal_RNA
gatcctggctcaggatgaacgctggcggcgtgcctaatacatgcaagtcgaacgcgagcacttgtgctcgagtggcgaacgggtgagtaatacataagtaacctgccctagacagggggataactattggaaacgatagctaagaccgcataggtacggacactgcatggtgaccgtattaaaagtgcctcaaagcactggtagaggatggacttatggcgcattagctggttggcggggtaacggcccaccaaggcgacgatgcgtagccgacctgagagggtgaccggccacactgggactgagacacggcccagactcctacgggaggcagcagtagggaattttcggcaatgggggaaaccctgaccgagcaacgccgcgtgaaggaagaaggttttcggattgtaaacttctgttataaaggaagaacggcggctacaggaaatggtagccgagtgacggtactttattagaaagccacggctaactacgtgccagcagccgcggtaatacgtaggtggcaagcgttatccggaattattgggcgtaaagagggagcaggcggcagcaagggtctgtggtgaaagcctgaagcttaacttcagtaagccatagaaaccaggcagctagagtgcaggagaggatcgtggaattccatgtgtagcggtgaaatgcgtagatatatggaggaacaccagtggcgaaggcgacgatctggcctgcaactgacgctcagtcccgaaagcgtggggagcaaataggattagataccctagtagtccacgccgtaaacgatgagtactaagtgttggatgtcaaagttcagtgctgcagttaacgcaataagtactccgcctgagtagtacgttcgcaagaatgaaactcaaaggaattgacggggcccgcacaagcggtggagcatgtggtttaattcgaagcaacgcgaagaaccttaccaggtcttgacatactcataaaggctccagagatggagagatagctatatgagatacaggtggtgcatggttgtcgtcagctcgtgtcgtgagatgttgggttaagtcccgcaacgagcgcaacccttatcgttagttaccatcattaagttggggactctagcgagactgccagtgacaagctggaggaaggcggggatgacgtcaaatcatcatgccccttatgacctgggctacacacgtgctacaatggatggtgcagagggaagcgaagccgcgaggtgaagcaaaaaccataaaaccattctcagttcggattgtagtctgcaactcgactacatgaagttggaatcgctagtaatcgcgaatcagcatgtcgcggtgaatacgttctcgggccttgtacacaccgcccgtcacaccacgagagttgataacacccgaagccggtggcctaaccgcaaggaaggagctgtctaaggtgggattgatgattggggtgaagtcgtaacaaggtatccctacgggaacgtggggatggatcacctcctttctaaggaaaac

SEQ ID NO: 282 - DNA, 1524 bp, Artificial Sequence
  STR00092.3 Erysipelatoclostridium_ramosum_strain_JCM_1298_16S_ribosomal_RNA
taaagcaccagactttgataaatttaaagatttcttgttatctgaaaaccgttttgcacaattgttaaaggttaatccagaacatgcggaggcattaatggagaaatgtttagctgatgctaaaaaacgtcgtttaagattagatagaatggcataaaaagtttaaatcagaggaaaaatcctctgattttttcttattcgactgcaaatatagttgattattacactgttttttggaaacttaataaaaaaataaaaaaaatgtataaaattctttacaagagcaaatattagtgatagaataatcatgcactcgagataagagtggagatcattgaaaactaaacagaattaagaaacacacgtcaatatccagaaggataaaaaagaaaaaagagctaaacaaacgaagagttgtttaaataaacaatggagagtttgatcctggctcaggatgaacgctggcggcgtgcctaatacatgcaagtcgaacgcgagcacttgtgctcgagtggcgaacgggtgagtaatacataagtaacctgccctagacagggggataactattggaaacgatagctaagaccgcataggtacggacactgcatggtgaccgtattaaaagtgcctcaaagcactggtagaggatggacttatggcgcattagctggttggcggggtaacggcccaccaaggcgacgatgcgtagccgacctgagagggtgaccggccacactgggactgagacacggcccagactcctacgggaggcagcagtagggaattttcggcaatgggggaaaccctgaccgagcaacgccgcgtgaaggaagaaggttttcggattgtaaacttctgttataaaggaagaacggcggctacaggaaatggtagccgagtgacggtactttattagaaagccacggctaactacgtgccagcagccgcggtaatacgtaggtggcaagcgttatccggaattattgggcgtaaagagggagcaggcggcagcaagggtctgtggtgaaagcctgaagcttaacttcagtaagccatagaaaccaggcagctagagtgcaggagaggatcgtggaattccatgtgtagcggtgaaatgcgtagatatatggaggaacaccagtggcgaaggcgacgatctggcctgcaactgacgctcagtcccgaaagcgtggggagcaaataggattagataccctagtagtccacgccgtaaacgatgagtactaagtgttggatgtcaaagttcagtgctgcagttaacgcaataagtactccgcctgagtagtacgttcgcaagaatgaaactcaaaggaattgacgggggcccgcacaagcggtggagcatgtggtttaattcgaagcaacgcgaagaaccttaccaggtcttgacatactcataaaggctccagagatggagagatagctatatgagatacaggtggtgcatggttgtcgtcagctcgtgtcgtgagatgttgggttaagtcccgcaacgagcgcaac

SEQ ID NO: 283 - DNA, 1523 bp, Artificial Sequence
  STR00092.4 Erysipelatoclostridium_ramosum_strain_JCM_1298_16S_ribosomal_RNA
taattgtaaaaaaggacgaagaccaagttttatcgatgctgctaaaccagatatttctagtccgctttatgatttttttaataaaaagttagaagaaaagggaattaatgtggaacgaggagtatttggagcaatgatggaggtatcattgattaatgatgggccagtgacaattatcttagatagtaatgagttattttattaacaaattgagtaaacttattgattttatatttttttacaaaaaaagacaaaaaaggctttacaagacaaaagggatatggtaaattaaataggcactcgaggaaagggacgtaaggaccggagagaaaaagcaaaaaagttaaaaaaaagattgactaaaaagcgaaaagagtgtaagatattcaagtcggcaaaagaagccggagagatcattgaaaactaaacagaattaagaaacacacgtcaatatccagaaggataaaaaagaaaaaagagctaaacaaacgaagagttgtttaaataaacaatggagagtttgatcctggctcaggatgaacgctggcggcgtgcctaatacatgcaagtcgaacgcgagcacttgtgctcgagtggcgaacgggtgagtaatacataagtaacctgccctagacagggggataactattggaaacgatagctaagaccgcataggtacggacactgcatggtgaccgtattaaaagtgcctcaaagcactggtagaggatggacttatgtcgcattagctggttggcggggtaacggcccaccaaggcgacgatgcgtagccgacctgagagggtgaccggccacactgggactgagacacggcccagactcctacgggaggcagcagtagggaattttcggcaatgggggaaaccctgaccgagcaacgccgcgtgaaggaagaaggttttcggattgtaaacttctgttataaaggaagaacggcggctacaggaaatggtagccgagtgacggtactttattagaaagccacggctaactacgtgccagcagccgcggtaatacgtaggtggcaagcgttatccggaattattgggcgtaaagagggagcaggcggcagcaagggtctgtggtgaaagcctgaagcttaacttcagtaagccatagaaaccaggcagctagagtgcaggagaggatcgtggaattccatgtgtagcggtgaaatgcgtagatatatggaggaacaccagtggcgaaggcgacgatctggcctgcaactgacgctcagtcccgaaagcgtggggagcaaataggattagataccctagtagtccacgccgtaaacgatgagtactaagtgttggatgtcaaagttcagtgctgcagttaacgcaataagtactccgcctgagtagtacgttcgcaagaatgaaactcaaaggaattgacgggggcccgcacaagcggtggagcatgtggtttaattcgaagcaacgcgaagaaccttaccaggtcttgacatactcataaggctccagagatggagagat

SEQ ID NO: 284 - DNA, 1521 bp, Artificial Sequence
  STR00096 Faecalicatena_orotica_strain_DSM_1287_16S_ribosomal_RNA
agagtttgatcctggctcaggatgaacgctggcggcgtgcttaacacatgcaagtcgagcgaagcactttacttagatttcttcggattgaagagtgttgtgactgagcggcggacgggtgagtaacgcgtgggtaacctgcctcatacagggggataacagttagaaatgactgctaataccgtataagaccacggtgccgcatggcacagtggtaaaaactccggtggtatgagatggacccgcgtctgattagcttgttggtaaggtaacggcttaccaaggcgacgatcagtagccgacctgagagggtgaccggccacattgggactgagacacggcccaaactcctacgggaggcagcagtggggaatattgcacaatgggggaaaccctgatgcagcgacgccgcgtgaaggatgaagtatttcggtatgtaaacttctatcagcagggaagaaaatgacggtacctgactaagaagccccggctaactacgtgccagcagccgcggtaatacgtagggggcaagcgttatccggatttactgggtgtaaagggagcgtagacggtgatgcaagtctgatgtgaaaacccggggctcaaccccgggactgcattggaaactgtgtgactagagtgtcggagaggtaagtggaattcctagtgtagcggtgaaatgcgtagatattaggaggaacaccagtggcgaaggcggcttactggacgatgactgacgttgaggctcgaaagcgtggggagcaaacaggattagataccctggtagtccacgccgtaaacgatgaatactaggtgtcgggtggcaaagccattcggtgccgcagcaaacgcagtaagtattccacctggggagtacgttcgcaagaatgaaactcaaaggaattgacggggacccgcacaagcggtggagcatgtggtttaattcgaagcaacgcgaagaaccttacctgctcttgacatcccgctgaccggccagtaatgtggccttcccttcggggcagtggagacaggtggtgcatggttgtcgtcagctcgtgtcgtgagatgttgggttaagtcccgcaacgagcgcaacccttatctttagtagccagcggtcaggccgggcactctagagagactgccagggataacctggaggaaggtggggatgacgtcaaatcatcatgccccttatgagcagggctacacacgtgctacaatggcgtaaacaaagggaagcaatactgtgaagtggagcaaatcccaaaaataacgtctcagttcggattgtagtctgcaactcgactacatgaagctggaatcgctagtaatcgcgaatcagaatgtcgcggtgaatacgttcccgggtcttgtacacaccgcccgtcacaccatgggagttggtaacgcccgaagtcagtgacccaaccgcaaggagggagctgccgaaggtgggaccgataactggggtgaagtcgtaacaaggtagccgtatcggaaggtgcggctggatcacct

SEQ ID NO: 285 - DNA, 1521 bp, Artificial Sequence
  STR00096.1 Faecalicatena_orotica_strain_DSM_1287_16S_ribosomal_RNA
agagtttgatcctggctcaggatgaacgctggcggcgtgcttaacacatgcaagtcgagcgaagcactttactttgatttcttcggaatgaagagtgttgtgactgagcggcggacgggtgagtaacgcgtgggtaacctgcctcatacagggggataacagttagaaatgactgctaataccgtataagaccacagtgccgcatggcacggtggtaaaaactccggtggtatgagatggacccgcgtctgattagcttgttggtaaggtaacggcttaccaaggcgacgatcagtagccgacctgagagggtgaccggccacattgggactgagacacggcccaaactcctacgggaggcagcagtggggaatattgcacaatgggggaaaccctgatgcagcgacgccgcgtgaaggatgaagtatttcggtatgtaaacttctatcagcagggaagaaaatgacggtacctgactaagaagccccggctaactacgtgccagcagccgcggtaatacgtagggggcaagcgttatccggatttactgggtgtaaagggagcgtagacggtaatgcaagtctgatgtgaaaacccggggctcaaccccgggactgcattggaaactgtgtgactagagtgtcggagaggtaagtggaattcctagtgtagcggtgaaatgcgtagatattaggaggaacaccagtggcgaaggcggcttactggacgatgactgacgttgaggctcgaaagcgtggggagcaaacaggattagataccctggtagtccacgccgtaaacgatgaatactaggtgtcgggtggcaaagccattcggtgccgcagcaaacgcagtaagtattccacctggggagtacgttcgcaagaatgaaactcaaaggaattgacggggacccgcacaagcggtggagcatgtggtttaattcgaagcaacgcgaagaaccttacctgctcttgacatcccgctgaccggccagtaatgtggccttcccttcggggcagtggagacaggtggtgcatggttgtcgtcagctcgtgtcgtgagatgttgggttaagtcccgcaacgagcgcaacccttatctttagtagccagcggtcaggccgggcactctagagagactgccagggataacctggaggaaggtggggatgacgtcaaatcatcatgccccttatgagcagggctacacacgtgctacaatggcgtaaacaaagggaggcaatactgtgaagtggagcaaatcccaaaaataacgtctcagttcggattgtagtctgcaactcgactacatgaagctggaatcgctagtaatcgcgaatcagaatgtcgcggtgaatacgttcccgggtcttgtacacaccgcccgtcacaccatgggagttggtaacgcccgaagtcagtgacccaaccgcaaggagggagctgccgaaggtgggaccgataactggggtgaagtcgtaacaaggtagccgtatcggaaggtgcggctggatcacct

SEQ ID NO: 286 - DNA, 1521 bp, Artificial Sequence
  STR00096.2 Faecalicatena_orotica_strain_DSM_1287_16S_ribosomal_RNA
agagtttgatcctggctcaggatgaacgctggcggcgtgcttaacacatgcaagtcgagcgaagcactttacttagatttcttcggattgaagagtgttgtgactgagcggcggacgggtgagtaacgcgtgggtaacctgcctcatacagggggataacagttagaaatgactgctaataccgtataagaccacggtgccgcatggcacagtggtaaaaactccggtggtatgagatggacccgcgtctgattagcttgttggtaaggtaacggcctaccaaggcgacgatcagtagccgacctgagagggtgaccggccacattgggactgagacacggcccaaactcctacgggaggcagcagtggggaatattgcacaatgggggaaaccctgatgcagcgacgccgcgtgaaggatgaagtatttcggtacgtaaacttctatcagcagggaagaaaatgacggtacctgactaagaagccccggctaactacgtgccagcagccgcggtaatacgtagggggcaagcgttatccggatttactgggtgtaaagggagcgtagacggtgatgcaagtctgatgtgaaaacccggggctcaaccccgggactgcattggaaactgtgtgactagagtgtcggagaggtaagtggaattcctagtgtagcggtgaaatgcgtagatattaggaggaacaccagtggcgaaggcggcttactggacgatgactgacgttgaggctcgaaagcgtggggagcaaacaggattagataccctggtagtccacgccgtaaacgatgaatactaggtgtcgggtggcaaagccattcggtgccgcagcaaacgcagtaagtattccacctggggagtacgttcgcaagaatgaaactcaaaggaattgacggggacccgcacaagcggtggagcatgtggtttaattcgaagcaacgcgaagaaccttacctgctcttgacatcccgctgaccggccagtaatgtggccttcccttcggggcagtggagacaggtggtgcatggttgtcgtcagctcgtgtcgtgagatgttgggttaagtcccgcaacgagcgcaacccctatctttagtagccagcggtcaggccgggcactctagagagactgccagggataacctggaggaaggtggggatgacgtcaaatcatcatgccccttatgagcagggctacacacgtgctacaatggcgtaaacaaagggaggcaatactgtgaagtggagcaaatcccaaaaataacgtctcagttcggattgtagtctgcaactcgactacatgaagctggaatcgctagtaatcgcgaatcagaatgtcgcggtgaatacgttcccgggtcttgtacacaccgcccgtcacaccatgggagttggtaacgcccgaagtcagtgacccaaccgcaaggagggagctgccgaaggtgggaccgataactggggtgaagtcgtaacaaggtagccgtatcggaaggtgcggctggatcacct

SEQ ID NO: 287 - DNA, 1522 bp, Artificial Sequence
  STR00096.3 Faecalicatena_orotica_strain_DSM_1287_16S_ribosomal_RNA
agagtttgatcctggctcaggatgaacgctggcggcgtgcttaacacatgcaagtcgagcgaagcacaatactcaagatttcttcggattgaagagtgttgtgactgagcggcggacgggtgagtaacgcgtgggtaacctgcctcatacagggggataacagttagaaatgactgctaataccgtataagaccacagtgccgcatggcacagtggtaaaaactccggtggtatgagatggacccgcgtctgattagcttgttggtaaggtaacggcttaccaaggcgacgatcagtagccgacctgagagggtgaccggccacattgggactgagacacggcccaaactcctacgggaggcagcagtggggaatattgcacaatgggggaaaccctgatgcagcgacgccgcgtgaaggatgaagtatttcggtatgtaaacttctatcagcagggaagaaaatgacggtacctgactaagaagccccggctaactacgtgccagcagccgcggtaatacgtagggggcaagcgttatccggatttactgggtgtaaagggagcgtagacggtgatgcaagtctgatgtgaaaacccggggctcaaccccgggactgcattggaaactgtgtgactagagtgtcggagaggtaagtggaattcctagtgtagcggtgaaatgcgtagatattaggaggaacaccagtggcgaaggcggcttactggacgatgactgacgttgaggctcgaaagcgtggggagcaaacaggattagataccctggtagtccacgccgtaaacgatgaatactaggtgtcgggtggcaaagccattcggtgccgcagcaaacgcagtaagtattccacctggggagtacgttcgcaagaatgaaactcaaaggaattgacggggacccgcacaagcggtggagcatgtggtttaattcgaagcaacgcgaagaaccttacctgctcttgacatcccgctgaccggccagtaatgtggccttcccttcggggcagtggagacaggtggtgcatggttgtcgtcagctcgtgtcgtgagatgttgggttaagtcccgcaacgagcgcaacccttatctttagtagccagcggcttggccgggcactctagagagactgccagggataacctggaggaaggtggggatgacgtcaaatcatcatgccccttatgagcagggctacacacgtgctacaatggcgtaaacaaagggaggcaatactgtgaagtggagcaaatcccaaaaataacgtctcagttcggattgtagtctgcaactcgactacatgaagctggaatcgctagtaatcgcgaatcagaatgtcgcggtgaatacgttcccgggtcttgtacacaccgcccgtcacaccatgggagttggtaacgcccgaagtcagtgacccaaccgcaaggagggagctgccgaaggtgggaccgataactggggtgaagtcgtaacaaggtagccgtatcggaaggtgcggctggatcacct

SEQ ID NO: 288 - DNA, 1521 bp, Artificial Sequence
  STR00096.4 Faecalicatena_orotica_strain_DSM_1287_16S_ribosomal_RNA
agagtttgatcctggctcaggatgaacgctggcggcgtgcttaacacatgcaagtcgagcgaagcactttacttagatttcttcggattgaagagtgttgtgactgagcggcggacgggtgagtaacgcgtgggtaacctgcctcatacagggggataacagttagaaatgactgctaataccgtataagaccacggtgccgcatggcacagtggtaaaaactccggtggtatgagatggacccgcgtctgattagctagttggtagggtaacggcttaccaaggcgacgatcagtagccgacctgagagggtgaccggccacattgggactgagacacggcccaaactcctacgggaggcagcagtggggaatattgcacaatgggggaaaccctgatgcagcgacgccgcgtgaaggatgaagtatttcggtatgtaaacttctatcagcagggaagaaaatgacggtacctgactaagaagccccggctaactacgtgccagcagccgcggtaatacgtagggggcaagcgttatccggatttactgggtgtaaagggagcgtagacggtgatgcaagtctgatgtgaaaacccggggctcaaccccgggactgcattggaaactgtgtgactagagtgtcggagaggtaagtggaattcctagtgtagcggtgaaatgcgtagatattaggaggaacaccagtggcgaaggcggcttactggacgatgactgacgttgaggctcgaaagcgtggggagcaaacaggattagataccctggtagtccacgccgtaaacgatgaatactaggtgtcgggtggcaaagccattcggtgccgcagcaaacgcagtaagtattccacctggggagtacgttcgcaagaatgaaactcaaaggaattgacggggacccgcacaagcggtggagcatgtggtttaattcgaagcaacgcgaagaaccttacctgctcttgacatcccgctgaccggccagtaatgtggccttcccttcggggcagtggagacaggtggtgcatggttgtcgtcagctcgtgtcgtgagatgttgggttaagtcccgcaacgagcgcaacccttatctttagtagccagcggtcaggccgggcactctagagagactgccagggataacctggaggaaggtggggatgacgtcaaatcatcatgccccttatgagcagggctacacacgtgctacaatggcgtaaacaaagggaggcaatactgtgaagtggagcaaatcccaaaaataacgtctcagttcggattgtagtctgcaactcgactacatgaagctggaatcgctagtaatcgcgaatcagaatgtcgcggtgaatacgttcccgggtcttgtacacaccgcccgtcacaccatgggagttggtaacgcccgaagtcagtgacccaaccgcaaggagggagctgccgaaggtgggaccgataactggggtgaagtcgtaacaaggtagccgtatcggaaggtgcggctggatcacct

SEQ ID NO: 289 - DNA, 1515 bp, Artificial Sequence
  STR00097.5 Emergencia_timonensis_strain_SN18_16S_ribosomal_RNA
aattaagagtttgatcctggctcaggatgaacgctggcggcgtgcctaacacatgcaagtcgagcgagaagccattgactgaaacttcggtagaaggatatggtggaaagcggcggacgggtgagtaacgcgtaggcaacctgccccttacagagggatagccattggaaacgatgattaaaacctcataacgcatcccccccacatggaggggatgccaaagattcatcggtaagggatgggcctgcgtctgattagcttgttggcggggtaacggcccaccaaggcgacgatcagtagccgacctgagagggtgatcggccacattggaactgagacacggtccaaactcctacgggaggcagcagtggggaatattgcacaatgggcgaaagcctgatgcagcaacgccgcgtgagggatgaaggccttcgggtcgtaaacctctgtccttggggaagaaacaaatgacggtacccatggaggaagccccggctaactacgtgccagcagccgcggtaatacgtagggggcgagcgttatccggaattattgggcgtaaagagtgcgtaggtggttacctaagcgcagggtctaaggcaatggctcaaccattgttcgccctgcgaactgggctacttgagtgcaggagaggaaagcggaattcctagtgtagcggtgaaatgcgtagatattaggaggaacaccagtggcgaaggcggctttctggactgttactgacactgaggcacgaaagcgtggggagcaaacaggattagataccctggtagtccacgccgtaaacgatgagcactaggtgtcggggccgcaaggcttcggtgccgcagttaacgcattaagtgctccgcctggggagtacgcacgcaagtgtgaaactcaaaggaattgacggggacccgcacaagcagcggagcatgtggtttaattcgaagcaacgcgaagaaccttaccaggacttgacatcccactgacagatccctaaccggatccttcttcggacagtggagacaggtggtgcatggttgtcgtcagctcgtgtcgtgagatgttgggttaagtcccgcaacgagcgcaacccttgccattagttgccatcattcagttgggcactctaatgggactgccggggacaactcggaggaaggtggggatgacgtcaaatcatcatgccccttatgttctgggctacacacgtgctacaatggccggtacagcaagaagcaaaaccgcgaggtggagcaaatctcaaaaaccggtcccagttcggactgcaggctgaaacccgcctgcacgaagccggagttgctagtaatcgtggatcagaatgccacggtgaatgcgttcccgggtcttgtacacaccgcccgtcacaccatggaagttgggggtgcccgaagccggcagggaaatatgctgtctaaggcaaaaccaatgactggggtgaagtcgtaacaaggtagccgtatcggaaggtgcggctggatcacctccttt

SEQ ID NO: 290 - DNA, 1515 bp, Artificial Sequence; identical to SEQ ID NO: 289
  STR00097.1 Emergencia_timonensis_strain_SN18_16S_ribosomal_RNA

SEQ ID NO: 291 - DNA, 1515 bp, Artificial Sequence; identical to SEQ ID NO: 289
  STR00097.2 Emergencia_timonensis_strain_SN18_16S_ribosomal_RNA

SEQ ID NO: 292 - DNA, 1529 bp, Artificial Sequence
  STR00105 Dorea_longicatena_strain_111-35_16S_ribosomal_RNA
aacgagagtttgatcctggctcaggatgaacgctggcggcgtgcttaacacatgcaagtcgagcgaagcacttaagtctgattcttcggatgaagacttttgtgactgagcggcggacgggtgagtaacgcgtgggtaacctgcctcatacagggggataacagttagaaatgactgctaataccgcataagaccacggtaccgcatggtacagtggtaaaaactccggtggtatgagatggacccgcgtctgattaggtagttggtggggtaacggcctaccaagccgacgatcagtagccgacctgagagggtgaccggccacattgggactgagacacggcccagactcctacgggaggcagcagtggggaatattgcacaatggaggaaactctgatgcagcgacgccgcgtgaaggatgaagtatttcggtatgtaaacttctatcagcagggaagaaaatgacggtacctgactaagaagccccggctaactacgtgccagcagccgcggtaatacgtagggggcaagcgttatccggatttactgggtgtaaagggagcgtagacggcacggcaagccagatgtgaaagcccggggctcaaccccgggactgcatttggaactgctgagctagagtgtcggagaggcaagtggaattcctagtgtagcggtgaaatgcgtagatattaggaggaacaccagtggcgaaggcggcttgctggacgatgactgacgttgaggctcgaaagcgtggggagcaaacaggattagataccctggtagtccacgccgtaaacgatgactgctaggtgtcgggtggcaaagccattcggtgccgcagctaacgcaataagcagtccacctggggagtacgttcgcaagaatgaaactcaaaggaattgacggggacccgcacaagcggtggagcatgtggtttaattcgaagcaacgcgaagaaccttacctgatcttgacatcccgatgaccgcttcgtaatggaagcttttcttcggaacatcggtgacaggtggtgcatggttgtcgtcagctcgtgtcgtgagatgttgggttaagtcccgcaacgagcgcaacccctatcttcagtagccagcaggttaagctgggcactctggagagactgccagggataacctggaggaaggtggggatgacgtcaaatcatcatgccccttatgaccagggctacacacgtgctacaatggcgtaaacaaagagaagcgaactcgcgagggtaagcaaatctcaaaaataacgtctcagttcggattgtagtctgcaactcgactacatgaagctggaatcgctagtaatcgcagatcagaatgctgcggtgaatacgttcccgggtcttgtacacaccgcccgtcacaccatgggagtcagtaacgcccgaagtcagtgacccaaccgtaaggagggagctgccgaaggtgggaccgataactggggtgaagtcgtaacaaggtagccgtatcggaaggtgcggctggatcacctccttt

SEQ ID NO: 293 - DNA, 1529 bp, Artificial Sequence; identical to SEQ ID NO: 292
  STR00105.2 Dorea_longicatena_strain_111-35_16S_ribosomal_RNA

SEQ ID NO: 294 - DNA, 1527 bp, Artificial Sequence
  STR00132 Eisenbergiella_tayi_strain_B086562_16S_ribosomal_RNA
agagagtttgatcctggctcaggatgaacgctggcggcgtgcctaacacatgcaagtcgaacgaagttacacagaggaagttttcggatggaatcagtataacttagtggcggacgggtgagtaacgcgtgggaaacctgccctgtaccgggggataacacttagaaataggtgctaataccgcataagcgcacggaaccgcatggttctgtgtgaaaaactccggtggtacaggatggtcccgcgtctgattagccagttggcagggtaacggcctaccaaagcgacgatcagtagccggcctgagagggtgaacggccacattgggactgagacacggcccaaactcctacgggaggcagcagtggggaatattgcacaatgggggaaaccctgatgcagcgacgccgcgtgagtgaagaagtatttcggtatgtaaagctctatcagcagggaagaaaatgacggtacctgactaagaagccccggctaactacgtgccagcagccgcggtaatacgtagggggcaagcgttatccggatttactgggtgtaaagggagcgtagacggcatggcaagccagatgtgaaaacccagggctcaaccttgggattgcatttggaactgccaggctggagtgcaggagaggtaagcggaattcctagtgtagcggtgaaatgcgtagatattaggaggaacaccagtggcgaaggcggcttactggactgtaactgacgttgaggctcgaaagcgtggggagcaaacaggattagataccctggtagtccacgcggtaaacgatgattgctaggtgtaggtgggtatggacccatcggtgccgcagctaacgcaataagcaatccacctggggagtacgttcgcaagaatgaaactcaaaggaattgacggggacccgcacaagcggtggagcatgtggtttaattcgaagcaacgcgaagaaccttaccaagtcttgacatcccaatgacgcacctgtaaagaggtgttcccttcggggcattggagacaggtggtgcatggttgtcgtcagctcgtgtcgtgagatgttgggttaagtcccgcaacgagcgcaacccttattcttagtagccagcaggtagagctgggcactctaaggagactgccggggataacccggaggaaggcggggatgacgtcaaatcatcatgccccttatgatttgggctacacacgtgctacaatggcgtaaacaaagggaagcgagacagtgatgtggagcaaatcccagaaataacgtctcagttcggattgtagtctgcaactcgactacatgaagctggaatcgctagtaatcgcgaatcagcatgtcgcggtgaatacgttcccgggtcttgtacacaccgcccgtcacaccatgggagttggaaatgcccgaagtctgtgacctaaccgaaagggaggagcagccgaaggcaggtctgataactggggtgaagtcgtaacaaggtagccgtatcggaaggtgcggctggatcacctccttt

SEQ ID NO: 295 - DNA, 1527 bp, Artificial Sequence; identical to SEQ ID NO: 294
  STR00132.1 Eisenbergiella_tayi_strain_B086562_16S_ribosomal_RNA

SEQ ID NO: 296 - DNA, 1529 bp, Artificial Sequence
  STR00105.4 Dorea_longicatena_strain_111-35_16S_ribosomal_RNA
aacgagagtttgatcctggctcaggatgaacgctggcggcgtgcttaacacatgcaagtcgagcgaagcacttaagtttgattcttcggatgaagacttttgtgactgagcggcggacgggtgagtaacgcgtgggtaacctgcctcatacagggggataacagttagaaatgactgctaataccgcataagaccacggtaccgcatggtacagtggtaaaaactccggtggtatgagatggacccgcgtctgattaggtagttggtggggtaacggcctaccaagccgacgatcagtagccgacctgagagggtgaccggccacattgggactgagacacggcccagactcctacgggaggcagcagtggggaatattgcacaatggaggaaactctgatgcagcgacgccgcgtgaaggatgaagtatttcggtatgtaaacttctatcagcagggaagaaaatgacggtacctgactaagaagccccggctaactacgtgccagcagccgcggtaatacgtagggggcaagcgttatccggatttactgggtgtaaagggagcgtagacggcacggcaagccagatgtgaaagcccggggctcaaccccgggactgcatttggaactgctgagctagagtgtcggagaggcaagtggaattcctagtgtagcggtgaaatgcgtagatattaggaggaacaccagtggcgaaggcggcttgctggacgatgactgacgttgaggctcgaaagcgtggggagcaaacaggattagataccctggtagtccacgccgtaaacgatgactgctaggtgtcgggtggcaaagccattcggtgccgcagctaacgcaataagcagtccacctggggagtacgttcgcaagaatgaaactcaaaggaattgacggggacccgcacaagcggtggagcatgtggtttaattcgaagcaacgcgaagaaccttacctgatcttgacatcccgatgaccgcttcgtaatggaagcttttcttcggaacatcggtgacaggtggtgcatggttgtcgtcagctcgtgtcgtgagatgttgggttaagtcccgcaacgagcgcaacccctatcttcagtagccagcaggttaagctgggcactctggagagactgccagggataacctggaggaaggtggggatgacgtcaaatcatcatgccccttatgaccagggctacacacgtgctacaatggcgtaaacaaagagaagcgaactcgcgagggtaagcaaatctcaaaaataacgtctcagttcggattgtagtctgcaactcgactacatgaagctggaatcgctagtaatcgcagatcagaatgctgcggtgaatacgttcccgggtcttgtacacaccgcccgtcacaccatgggagtcagtaacgcccgaagtcagtgacccaaccgtaaggagggagctgccgaaggtgggaccgataactggggtgaagtcgtaacaaggtagccgtatcggaaggtgcggctggatcacctccttt

SEQ ID NO: 297 - DNA, 1529 bp, Artificial Sequence; identical to SEQ ID NO: 296
  STR00105.5 Dorea_longicatena_strain_111-35_16S_ribosomal_RNA

SEQ ID NO: 298 - DNA, 1531 bp, Artificial Sequence
  STR00107 [Clostridium]_aldenense_strain_RMA_9741_16S_ribosomal_RNA
tttgagagtttgatcctggctcaggatgaacgctggcggcgtgcctaacacatgcaagtcgaacgaagcgattaggatgaagttttcggatggattcctggttgactgagtggcggacgggtgagtaacgcgtggataacctgcctcacactgggggataacagttagaaatggctgctaataccgcataagcgcacagtaccgcatggtacggtgtgaaaaacccaggtggtgtgagatggatccgcgtctgattagccagttggcggagtaacggcccaccaaagcgacgatcagtagccgacctgagagggtgaccggccacattgggactgagacacggcccaaactcctacgggaggcagcagtggggaatattgcacaatgggcggaagcctgatgcagcgacgccgcgtgagtgaagaagtatctcggtatgtaaagctctatcagcagggaagaaaatgacggtacctgactaagaagccccggctaactacgtgccagcagccgcggtaatacgtagggggcaagcgttatccggatttactgggtgtaaagggagcgtagacggcgacgcaagtctggagtgaaagcccggggcccaaccccgggactgctttggaaactgtgctgctggagtgcaggagaggtaagtggaattcctagtgtagcggtgaaatgcgtagatattaggaggaacaccagtggcgaaggcggcttactggactgtaactgacgttgaggctcgaaagcgtggggagcaaacaggattagataccctggtagtccacgccgtaaacgatgaatgctaggtgtcggggggcaaagcccttcggtgccgccgctaacgcaataagcattccacctggggagtacgttcgcaagaatgaaactcaaaggaattgacggggacccgcacaagcggtggagcatgtggtttaattcgaagcaacgcgaagaaccttaccaagtcttgacatccccctgaccggcgcgtaacggtgcccttccttcgggacaggggagacaggtggtgcatggttgtcgtcagctcgtgtcgtgagatgttgggttaagtcccgcaacgagcgcaacccttatccttagtagccagcacgtcgtggtgggcactctagggagactgccagggataacctggaggaaggtggggatgacgtcaaatcatcatgccccttatgatttgggctacacacgtgctacaatggcgtaaacaaagggaggcgaccctgcgaaggtaagcaaatcccaaaaataacgtcccagttcggactgtagtctgcaacccgactacacgaagctggaatcgctagtaatcgcggatcagaatgccgcggtgaatacgttcccgggtcttgtacacaccgcccgtcacaccatgggagtcagcaacgcccgaagtcagtgacccaaccttaacaggagggagctgccgaaggcggggcaggtaactggggtgaagtcgtaacaaggtagccgtatcggaaggtgcggctggatcacctccttt

SEQ ID NO: 299 - DNA, 1531 bp, Artificial Sequence
  STR00107.1 [Clostridium]_aldenense_strain_RMA_9741_16S_ribosomal_RNA
tttgagagtttgatcctggctcaggatgaacgctggcggcgtgcctaacacatgcaagtcgaacgaagcgattaggatgaagttttcggatggattcctggttgactgagtggcggacgggtgagtaacgcgtggataacctgcctcacactgggggataacagttagaaatggctgctaataccgcataagcgcacagtaccgcatggtacggtgtgaaaaacccaggtggtgtgagatggatccgcgtctgattagccagttggcggggtaacggcccaccaaagcgacgatcagtagccgacctgagagggtgaccggccacattgggactgagacacggcccaaactcctacgggaggcagcagtggggaatattgcacaatgggcggaagcctgatgcagcgacgccgcgtgagtgaagaagtatctcggtatgtaaagctctatcagcagggaagaaaatgacggtacctgactaagaagccccggctaactacgtgccagcagccgcggtaatacgtagggggcaagcgttatccggatttactgggtgtaaagggagcgtagacggcgacgcaagtctggagtgaaagcccggggcccaaccccgggactgctttggaaactgtgctgctggagtgcaggagaggtaagtggaattcctagtgtagcggtgaaatgcgtagatattaggaggaacaccagtggcgaaggcggcttactggactgtaactgacgttgaggctcgaaagcgtggggagcaaacaggattagataccctggtagtccacgccgtaaacgatgaatgctaggtgtcggggggcaaagcccttcggtgccgccgctaacgcaataagcattccacctggggagtacgttcgcaagaatgaaactcaaaggaattgacggggacccgcacaagcggtggagcatgtggtttaattcgaagcaacgcgaagaaccttaccaagtcttgacatccccctgaccggcgcgtaacggtgcccttccttcgggacaggggagacaggtggtgcatggttgtcgtcagctcgtgtcgtgagatgttgggttaagtcccgcaacgagcgcaacccttatccttagtagccagcacgtcgtggtgggcactctagggagactgccagggataacctggaggaaggtggggatgacgtcaaatcatcatgccccttatgatttgggctacacacgtgctacaatggcgtaaacaaagggaggcgaccctgcgaaggtaagcaaatcccaaaaataacgtcccagttcggactgtagtctgcaacccgactacacgaagctggaatcgctagtaatcgcggatcagaatgccgcggtgaatacgttcccgggtcttgtacacaccgcccgtcacaccatgggagtcagcaacgcccgaagtcagtgacccaaccttaacaggagggagctgccgaaggcggggcaggtaactggggtgaagtcgtaacaaggtagccgtatcggaaggtgcggctggatcacctccttt

SEQ ID NO: 300 - DNA, 1529 bp, Artificial Sequence
  STR00107.2 [Clostridium]_aldenense_strain_RMA_9741_16S_ribosomal_RNA
tttgagagtttgatcctggctcaggatgaacgctggcggcgtgcctaacacatgcaagtcgaacgaagcgactggaggaagttttcggatggaatccggttgactgagtggcggacgggtgagtaacgcgtggataacctgcctcacactgggggataacagttagaaatggctgctaataccgcataagcgcacagtaccgcatggtacggtgtgaaaaacccaggtggtgtgagatggatccgcgtctgattagccagttggcggggtaacggcccaccaaagcgacgatcagtagccgacctgagagggtgaccggccacattgggactgagacacggcccaaactcctacgggaggcagcagtggggaatattgcacaatgggcggaagcctgatgcagcgacgccgcgtgagtgaagaagtatctcggtatgtaaagctctatcagcagggaagaaaatgacggtacctgactaagaagccccggctaactacgtgccagcagccgcggtaatacgtagggggcaagcgttatccggatttactgggtgtaaagggagcgtagacggcgacgcaagtctggagtgaaagcccggggcccaaccccgggactgctttggaaactgtgctgctggagtgcaggagaggtaagtggaattcctagtgtagcggtgaaatgcgtagatattaggaggaacaccagtggcgaaggcggcttactggactgtaactgacgttgaggctcgaaagcgtggggagcaaacaggattagataccctggtagtccacgccgtaaacgatgaatgctaggtgtcggggggtaaagcccttcggtgccgccgctaacgcaataagcattccacctggggagtacgttcgcaagaatgaaactcaaaggaattgacggggacccgcacaagcggtggagcatgtggtttaattcgaagcaacgcgaagaaccttaccaagtcttgacatccccctgaccggtccgtaacggggcctttccttcgggacaggggagacaggtggtgcatggttgtcgtcagctcgtgtcgtgagatgttgggttaagtcccgcaacgagcgcaacccttatccttagtagccagcacgtcgtggtgggcactctagggagactgccagggataacctggaggaaggtggggatgacgtcaaatcatcatgccccttatgatttgggctacacacgtgctacaatggcgtaaacaaagggaggcgaccctgcgaaggcaagcaaatcccaaaaataacgtcccagttcggactgtagtctgcaacccgactacacgaagctggaatcgctagtaatcgcggatcagaatgccgcggtgaatacgttcccgggtcttgtacacaccgcccgtcacaccatgggagtcagcaacgcccgaagtcagtgacccaaccttaacaggagggagctgccgaaggcggggcaggtaactggggtgaagtcgtaacaaggtagccgtatcggaaggtgcggctggatcacctccttt

SEQ ID NO: 301 - DNA, 1531 bp, Artificial Sequence; identical to SEQ ID NO: 299
  STR00107.3 [Clostridium]_aldenense_strain_RMA_9741_16S_ribosomal_RNA

SEQ ID NO: 302 - DNA, 1529 bp, Artificial Sequence
  STR00107.4 [Clostridium]_aldenense_strain_RMA_9741_16S_ribosomal_RNA
tttgagagtttgatcctggctcaggatgaacgctggcggcgtgcctaacacatgcaagtcgaacgaagcgactggaggaagttttcggatggaatccggttgactgagtggcggacgggtgagtaacgcgtggataacctgcctcacactgggggataacagttagaaatggctgctaataccgcataagcgcacagtaccgcatggtacggtgtgaaaaacccaggtggtgtgagatggatccgcgtctgattagccagttggcggggtaacggcccaccaaagcgacgatcagtagccgacctgagagggtgaccggccacattgggactgagacacggcccaaactcctacgggaggcagcagtggggaatattgcacaatgggcggaagcctgatgcagcgacgccgcgtgagtgaagaagtatctcggtatgtaaagctctatcagcagggaagaaaatgacggtacctgactaagaagccccggctaactacgtgccagcagccgcggtaatacgtagggggcaagcgttatccggatttactgggtgtaaagggagcgtagacggcgacgcaagtctggagtgaaagcccggggcccaaccccgggactgctttggaaactgtgctgctggagtgcaggagaggtaagtggaattcctagtgtagcggtgaaatgcgtagatattaggaggaacaccagtggcgaaggcggcttactggactgtaactgacgttgaggctcgaaagcgtggggagcaaacaggattagataccctggtagtccacgccgtaaacgatgaatgctaggtgtcggggggcaaagcccttcggtgccgccgctaacgcaataagcattccacctggggagtacgttcgcaagaatgaaactcaaaggaattgacggggacccgcacaagcggtggagcatgtggtttaattcgaagcaacgcgaagaaccttaccaagtcttgacatccccctgaccggcgcgtaacggtgcccttccttcgggacaggggagacaggtggtgcatggttgtcgtcagctcgtgtcgtgagatgttgggttaagtcccgcaacgagcgcaacccttatccttagtagccagcacgtcgtggtgggcactctagggagactgccagggataacctggaggaaggtggggatgacgtcaaatcatcatgccccttatgatttgggctacacacgtgctacaatggcgtaaacaaagggaggcgaccctgcgaaggtaagcaaatcccaaaaataacgtcccagttcggactgtagtctgcaacccgactacacgaagctggaatcgctagtaatcgcggatcagaatgccgcggtgaatacgttcccgggtcttgtacacaccgcccgtcacaccatgggagtcagcaacgcccgaagtcagtgacccaaccttaacaggagggagctgccgaaggcggggcaggtaactggggtgaagtcgtaacaaggtagccgtatcggaaggtgcggctggatcacctccttt

SEQ ID NO: 303 - DNA, 1527 bp, Artificial Sequence; identical to SEQ ID NO: 294
  STR00132.8 Eisenbergiella_tayi_strain_B086562_16S_ribosomal_RNA

SEQ ID NO: 304 - DNA, 1527 bp, Artificial Sequence; identical to SEQ ID NO: 294
  STR00132.2 Eisenbergiella_tayi_strain_B086562_16S_ribosomal_RNA

SEQ ID NO: 305 - DNA, 1527 bp, Artificial Sequence; identical to SEQ ID NO: 294
  STR00132.3 Eisenbergiella_tayi_strain_B086562_16S_ribosomal_RNA

SEQ ID NO: 306 - DNA, 1527 bp, Artificial Sequence; identical to SEQ ID NO: 294
  STR00132.6 Eisenbergiella_tayi_strain_B086562_16S_ribosomal_RNA

SEQ ID NO: 307 - DNA, 1534 bp, Artificial Sequence
  STR00139 [Clostridium]_scindens_strain_ATCC_35704_16S_ribosomal_RNA
aacgagagtttgatcctggctcaggatgaacgctggcggcgtgcctaacacatgcaagtcgaacgaagcgcttccgcctgattttcttcggagatgaaggcggctgcgactgagtggcggacgggtgagtaacgcgtgggcaacctgccttgcactgggggataacagccagaaatggctgctaataccgcataagaccgaagcgccgcatggcgcagcggccaaagccccggcggtgcaagatgggcccgcgtctgattaggtggttggcggggtaacggcccaccaagccgacgatcagtagccgacctgagagggtgaccggccacattgggactgagacacggcccagactcctacgggaggcagcagtggggaatattgcacaatgggggaaaccctgatgcagcgacgccgcgtgaaggatgaagtatttcggtatgtaaacttctatcagcagggaagaagatgacggtacctgactaagaagccccggctaactacgtgccagcagccgcggtaatacgtagggggcaagcgttatccggatttactgggtgtaaagggagcgtagacggcgatgcaagccagatgtgaaagcccggggctcaaccccgggactgcatttggaactgcgtggctggagtgtcggagaggcaggcggaattcctagtgtagcggtgaaatgcgtagatattaggaggaacaccagtggcgaaggcggcctgctggacgatgactgacgttgaggctcgaaagcgtggggagcaaacaggattagataccctggtagtccacgccgtaaacgatgactactaggtgtcgggtggcaaggccattcggtgccgcagcaaacgcaataagtagtccacctggggagtacgttcgcaagaatgaaactcaaaggaattgacggggacccgcacaagcggtggagcatgtggtttaattcgaagcaacgcgaagaaccttacctgatcttgacatcccgatgccaaagcgcgtaacgcgctctttcttcggaacatcggtgacaggtggtgcatggttgtcgtcagctcgtgtcgtgagatgttgggttaagtcccgcaacgagcgcaacccctatcttcagtagccagcatttcggatgggcactctggagagactgccagggacaacctggaggaaggtggggatgacgtcaaatcatcatgccccttatgaccagggctacacacgtgctacaatggcgtaaacaaagggaggcgaacccgcgagggtgggcaaatcccaaaaataacgtctcagttcggattgtagtctgcaactcgactacatgaagctggaatcgctagtaatcgcgaatcagaatgtcgcggtgaatacgttcccgggtcttgtacacaccgcccgtcacaccatgggagtcagtaacgcccgaagccggtgacccaacccgcaagggagggagccgtcgaaggtgggaccgataactggggtgaagtcgtaacaaggtagccgtatcggaaggtgcggctggatcacctccttt

SEQ ID NO: 308 - DNA, 1123 bp, Artificial Sequence
  STR00139.1 [Clostridium]_scindens_strain_ATCC_35704_16S_ribosomal_RNA
aacgagagtttgatcctggctcaggatgaacgctggcggcgtgcctaacacatgcaagtcgaacgaagcgcttccgcctgattttcttcggagatgaaggcggctgcgactgagtggcggacgggtgagtaacgcgtgggcaacctgccttgcactgggggataacagccagaaatggctgctaataccgcataagaccgaagcgccgcatggcgcagcggccaaagccccggcggtgcaagatgggcccgcgtctgattaggtggttggcggggtaacggcccaccaagccgacgatcagtagccgacctgagagggtgaccggccacattgggactgagacacggcccagactcctacgggaggcagcagtggggaatattgcacaatgggggaaaccctgatgcagcgacgccgcgtgaaggatgaagtatttcggtatgtaaacttctatcagcagggaagaagatgacggtacctgactaagaagccccggctaactacgtgccagcagccgcggtaatacgtagggggcaagcgttatccggatttactgggtgtaaagggagcgtagacggcgatgcaagccagatgtgaaagcccggggctcaaccccgggactgcatttggaactgcgtggctggagtgtcggagaggcaggcggaattcctagtgtagcggtgaaatgcgtagatattaggaggaacaccagtggcgaaggcggcctgctggacgatgactgacgttgaggctcgaaagcgtggggagcaaacaggattagataccctggtagtccacgccgtaaacgatgactactaggtgtcgggtggcaaggccattcggtgccgcagcaaacgcaataagtagtccacctggggagtacgttcgcaagaatgaaactcaaaggaattgacggggacccgcacaagcggtggagcatgtggtttaattcgaagcaacgcgaagaaccttacctgatcttgacatcccgatgccaaagcgcgtaacgcgctctttcttcggaacatcggtgacaggtggtgcatggttgtcgtcagctcgtgtcgtgagatgttgggttaagtcccgcaacgagcgcaacccctatcttcagtagccagca

SEQ ID NO: 309 - DNA, 1521 bp, Artificial Sequence; identical to SEQ ID NO: 285
  STR00096.8 Faecalicatena_orotica_strain_DSM_1287_16S_ribosomal_RNA

SEQ ID NO: 310 - DNA, 1521 bp, Artificial Sequence; identical to SEQ ID NO: 286
  STR00096.9 Faecalicatena_orotica_strain_DSM_1287_16S_ribosomal_RNA

SEQ ID NO: 311 - DNA, 1534 bp, Artificial Sequence; identical to SEQ ID NO: 307
  STR00139.2 [Clostridium]_scindens_strain_ATCC_35704_16S_ribosomal_RNA

SEQ ID NO: 312 - DNA, 1521 bp, Artificial Sequence; identical to SEQ ID NO: 288
  STR00096.7 Faecalicatena_orotica_strain_DSM_1287_16S_ribosomal_RNA

SEQ ID NO: 313 - DNA, 1521 bp, Artificial Sequence; identical to SEQ ID NO: 285
  STR00096.10 Faecalicatena_orotica_strain_DSM_1287_16S_ribosomal_RNA

SEQ ID NO: 314 - DNA, 1515 bp, Artificial Sequence; identical to SEQ ID NO: 289
  STR00097.6 Emergencia_timonensis_strain_SN18_16S_ribosomal_RNA

SEQ ID NO: 315 - DNA, 1515 bp, Artificial Sequence; identical to SEQ ID NO: 289
  STR00097 Emergencia_timonensis_strain_SN18_16S_ribosomal_RNA

SEQ ID NO: 316 - DNA, 1529 bp, Artificial Sequence; identical to SEQ ID NO: 292
  STR00105.9 Dorea_longicatena_strain_111-35_16S_ribosomal_RNA

SEQ ID NO: 317 - DNA, 1529 bp, Artificial Sequence
  STR00105.1 Dorea_longicatena_strain_111-35_16S_ribosomal_RNA
aacgagagtttgatcctggctcaggatgaacgctggcggcgtgcttaacacatgcaagtcgagcgaagcacttgagtttgattcttcggatgaagacttttgtgactgagcggcggacgggtgagtaacgcgtgggtaacctgcctcatacagggggataacagttagaaatgactgctaataccgcataagaccacggtaccgcatggtacagtggtaaaaactccggtggtatgagatggacccgcgtctgattaggtagttggtggggtaacggcctaccaagccgacgatcagtagccgacctgagagggtgaccggccacattgggactgagacacggcccagactcctacgggaggcagcagtggggaatattgcacaatggaggaaactctgatgcagcgacgccgcgtgaaggatgaagtatttcggtatgtaaacttctatcagcagggaagaaaatgacggtacctgactaagaagccccggctaactacgtgccagcagccgcggtaatacgtagggggcaagcgttatccggatttactgggtgtaaagggagcgtagacggcacggcaagccagatgtgaaagcccggggctcaaccccgggactgcatttggaactgctgagctagagtgtcggagaggcaagtggaattcctagtgtagcggtgaaatgcgtagatattaggaggaacaccagtggcgaaggcggcttgctggacgatgactgacgttgaggctcgaaagcgtggggagcaaacaggattagataccctggtagtccacgccgtaaacgatgactgctaggtgtcgggtggcaaagccattcggtgccgcagctaacgcaataagcagtccacctggggagtacgttcgcaagaatgaaactcaaaggaattgacggggacccgcacaagcggtggagcatgtggtttaattcgaagcaacgcgaagaaccttacctgatcttgacatcccgatgaccgcttcgtaatggaagcttttcttcggaacatcggtgacaggtggtgcatggttgtcgtcagctcgtgtcgtgagatgttgggttaagtcccgcaacgagcgcaacccctatcttcagtagccagcaggttaagctgggcactctggagagactgccagggataacctggaggaaggtggggatgacgtcaaatcatcatgccccttatgaccagggctacacacgtgctacaatggcgtaaacaaagagaagcgaactcgcgagggtaagcaaatctcaaaaataacgtctcagttcggattgtagtctgcaactcgactacatgaagctggaatcgctagtaatcgcagatcagaatgctgcggtgaatacgttcccgggtcttgtacacaccgcccgtcacaccatgggagtcagtaacgcccgaagtcagtgacccaaccgtaaggagggagctgccgaaggtgggaccgataactggggtgaagtcgtaacaaggtagccgtatcggaaggtgcggctggatcacctccttt

SEQ ID NO: 318 - DNA, 1529 bp, Artificial Sequence; identical to SEQ ID NO: 292
  STR00105.10 Dorea_longicatena_strain_111-35_16S_ribosomal_RNA

SEQ ID NO: 319 - DNA, 1529 bp, Artificial Sequence
  STR00105.3 Dorea_longicatena_strain_111-35_16S_ribosomal_RNA
tacgagagtttgatcctggctcaggatgaacgctggcggcgtgcttaacacatgcaagtcgagcgaagcacttaagtctgattcttcggatgaagacttttgtgactgagcggcggacgggtgagtaacgcgtgggtaacctgcctcatacagggggataacagttagaaatgactgctaataccgcataagaccacggtaccgcatggtacagtggtaaaaactccggtggtatgagatggacccgcgtctgattaggtagttggtggggtaacggcctaccaagccgacgatcagtagccgacctgagagggtgaccggccacattgggactgagacacggcccagactcctacgggaggcagcagtggggaatattgcacaatggaggaaactctgatgcagcgacgccgcgtgaaggatgaagtatttcggtatgtaaacttctatcagcagggaagaaaatgacggtacctgactaagaagccccggctaactacgtgccagcagccgcggtaatacgtagggggcaagcgttatccggatttactgggtgtaaagggagcgtagacggcacggcaagccagatgtgaaagcccggggctcaaccccgggactgcatttggaactgctgagctagagtgtcggagaggcaagtggaattcctagtgtagcggtgaaatgcgtagatattaggaggaacaccagtggcgaaggcggcttgctggacgatgactgacgttgaggctcgaaagcgtggggagcaaacaggattagataccctggtagtccacgccgtaaacgatgactgctaggtgtcgggtggcaaagccattcggtgccgcagctaacgcaataagcagtccacctggggagtacgttcgcaagaatgaaactcaaaggaattgacggggacccgcacaagcggtggagcatgtggtttaattcgaagcaacgcgaagaaccttacctgatcttgacatcccgatgaccgcttcgtaatggaagcttttcttcggaacatcggtgacaggtggtgcatggttgtcgtcagctcgtgtcgtgagatgttgggttaagtcccgcaacgagcgcaacccctatcttcagtagccagcaggttaagctgggcactctggagagactgccagggataacctggaggaaggtggggatgacgtcaaatcatcatgccccttatgaccagggctacacacgtgctacaatggcgtaaacaaagagaagcgaactcgcgagggtaagcaaatctcaaaaataacgtctcagttcggattgtagtctgcaactcgactacatgaagctggaatcgctagtaatcgcagatcagaatgctgcggtgaatacgttcccgggtcttgtacacaccgcccgtcacaccatgggagtcagtaacgcccgaagtcagtgacccaaccgtaaggagggagctgccgaaggtgggaccgataactggggtgaagtcgtaacaaggtagccgtatcggaaggtgcggctggatcacctccttt

SEQ ID NO: 320 - DNA, 1529 bp, Artificial Sequence; identical to SEQ ID NO: 296
  STR00105.11 Dorea_longicatena_strain_111-35_16S_ribosomal_RNA

SEQ ID NO: 321 - DNA, 1529 bp, Artificial Sequence; identical to SEQ ID NO: 296
  STR00105.8 Dorea_longicatena_strain_111-35_16S_ribosomal_RNA

SEQ ID NO: 322 - DNA, 1531 bp, Artificial Sequence; identical to SEQ ID NO: 299
  STR00107.6 [Clostridium]_aldenense_strain_RMA_9741_16S_ribosomal_RNA

SEQ ID NO: 323 - DNA, 1531 bp, Artificial Sequence; identical to SEQ ID NO: 299
  STR00107.7 [Clostridium]_aldenense_strain_RMA_9741_16S_ribosomal_RNA

SEQ ID NO: 324 - DNA, 1529 bp, Artificial Sequence; identical to SEQ ID NO: 300
  STR00107.8 [Clostridium]_aldenense_strain_RMA_9741_16S_ribosomal_RNA

SEQ ID NO: 325 - DNA, 1531 bp, Artificial Sequence; identical to SEQ ID NO: 299
  STR00107.9 [Clostridium]_aldenense_strain_RMA_9741_16S_ribosomal_RNA

SEQ ID NO: 326 - DNA, 1529 bp, Artificial Sequence; identical to SEQ ID NO: 302
  STR00107.10 [Clostridium]_aldenense_strain_RMA_9741_16S_ribosomal_RNA

SEQ ID NO: 327 - DNA, 1527 bp, Artificial Sequence; identical to SEQ ID NO: 294
  STR00132.9 Eisenbergiella_tayi_strain_B086562_16S_ribosomal_RNA

SEQ ID NO: 328 - DNA, 1527 bp, Artificial Sequence; identical to SEQ ID NO: 294
  STR00132.11 Eisenbergiella_tayi_strain_B086562_16S_ribosomal_RNA

SEQ ID NO: 329 - DNA, 1527 bp, Artificial Sequence; identical to SEQ ID NO: 294
  STR00132.10 Eisenbergiella_tayi_strain_B086562_16S_ribosomal_RNA

SEQ ID NO: 330 - DNA, 1527 bp, Artificial Sequence; identical to SEQ ID NO: 294
  STR00132.7 Eisenbergiella_tayi_strain_B086562_16S_ribosomal_RNA

SEQ ID NO: 331 - DNA, 1534 bp, Artificial Sequence; identical to SEQ ID NO: 307
  STR00139.3 [Clostridium]_scindens_strain_ATCC_35704_16S_ribosomal_RNA

SEQ ID NO: 332 - DNA, 1123 bp, Artificial Sequence; identical to SEQ ID NO: 308
  STR00132.12 [Clostridium]_scindens_strain_ATCC_35704_16S_ribosomal_RNA

SEQ ID NO: 333 - DNA, 1534 bp, Artificial Sequence; identical to SEQ ID NO: 307
  STR00139.7 [Clostridium]_scindens_strain_ATCC_35704_16S_ribosomal_RNA

SEQ ID NO: 334 - DNA, 1534 bp, Artificial Sequence; identical to SEQ ID NO: 307
  STR00139.5 [Clostridium]_scindens_strain_ATCC_35704_16S_ribosomal_RNA

SEQ ID NO: 335 - DNA, 1534 bp, Artificial Sequence; identical to SEQ ID NO: 307
  STR00139.6 [Clostridium]_scindens_strain_ATCC_35704_16S_ribosomal_RNA

SEQ ID NO: 336 - DNA, 1527 bp, Artificial Sequence
  STR00143 Blautia_obeum_ATCC_29174_16S_ribosomal_RNA
tcagagagtttgatcctggctcaggatgaacgctggcggcgtgcttaacacatgcaagtcgaacgggaaaccttttattgaagcttcggcagatttagctggtttctagtggcggacgggtgagtaacgcgtgggtaacctgccttatacagggggataacaaccagaaatggttgctaataccgcataagcgcacaggaccgcatggtccggtgtgaaaaactccggtggtataagatggacccgcgttggattagctagttggcagggtaacggcctaccaaggcgacgatccatagccggcctgagagggtgaacggccacattgggactgagacacggcccagactcctacgggaggcagcagtggggaatattgcacaatgggggaaaccctgatgcagcgacgccgcgtgaaggaagaagtatctcggtatgtaaacttctatcagcagggaagatagtgacggtacctgactaagaagccccggctaactacgtgccagcagccgcggtaatacgtagggggcaagcgttatccggatttactgggtgtaaagggagcgtagacggactggcaagtctgatgtgaaaggcgggggctcaacccctggactgcattggaaactgttagtcttgagtgccggagaggtaagcggaattcctagtgtagcggtgaaatgcgtagatattaggaggaacaccagtggcgaaggcggcttactggacggtaactgacgttgaggctcgaaagcgtggggagcaaacaggattagataccctggtagtccacgccgtaaacgatgaatactaggtgttggggagcaaagctcttcggtgccgccgcaaacgcattaagtattccacctggggagtacgttcgcaagaatgaaactcaaaggaattgacggggacccgcacaagcggtggagcatgtggtttaattcgaagcaacgcgaagaaccttaccaagtcttgacatccctctgaccgttccttaaccggaactttccttcgggacagaggagacaggtggtgcatggttgtcgtcagctcgtgtcgtgagatgttgggttaagtcccgcaacgagcgcaacccctatccccagtagccagcggttcggccgggcactctgaggagactgccagggataacctggaggaaggcggggatgacgtcaaatcatcatgccccttatgatttgggctacacacgtgctacaatggcgtaaacaaagggaagcaagcctgcgaaggtaagcaaatcccaaaaataacgtcccagttcggactgcagtctgcaactcgactgcacgaagctggaatcgctagtaatcgcggatcagaatgccgcggtgaatacgttcccgggtcttgtacacaccgcccgtcacaccatgggagtcagtaacgcccgaagtcagtgacctaactgcaaagaaggagctgccgaaggcgggaccgatgactggggtgaagtcgtaacaaggtagccgtatcggaaggtgcggctggatcacctccttt

SEQ ID NO: 337 - DNA, 1527 bp, Artificial Sequence
  STR00143.1 Blautia_obeum_ATCC_29174_16S_ribosomal_RNA
tcagagagtttgatcctggctcaggatgaacgctggcggcgtgcttaacacatgcaagtcgaacgggaaaccttttattgaagcttcggcagatttagctggtttctagtggcggacgggtgagtaacgcgtgggtaacctgccttatacagggggataacaaccagaaatggttgctaataccgcataagcgcacaggaccgcatggtccggtgtgaaaaactccggtggtataagatggacccgcgttggattagctagttggcagggtaacggcctaccaaggcgacgatccatagccggcctgagagggtgaacggccacattgggactgagacacggcccagactcctacgggaggcagcagtggggaatattgcacaatgggggaaaccctgatgcagcgacgccgcgtgaaggaagaagtatctcggtatgtaaacttctatcagcagggaagatagtgacggtacctgactaagaagccccggctaactacgtgccagcagccgcggtaatacgtagggggcaagcgttatccggatttactgggtgtaaagggagcgtagacggactggcaagtctgatgtgaaaggcgggggctcaacccctggactgcattggaaactgttagtcttgagtgccggagaggtaagcggaattcctagtgtagcggtgaaatgcgtagatattaggaggaacaccagtggcgaaggcggcttactggacggtaactgacgttgaggctcgaaagcgtggggagcaaacaggattagataccctggtagtccacgccgtaaacgatgaatactaggtgttggggagcaaagctcttcggtgccgccgcaaacgcattaagtattccacctggggagtacgttcgcaagaatgaaactcaaaggaattgacggggacccgcacaagcggtggagcatgtggtttaattcgaagcaacgcgaagaaccttaccaagtcttgacatccctctgaccgactcttaaccgagtctttccttcgggacagaggagacaggtggtgcatggttgtcgtcagctcgtgtcgtgagatgttgggttaagtcccgcaacgagcgcaacccctatccccagtagccagcggttcggccgggcactctgaggagactgccagggataacctggaggaaggcggggatgacgtcaaatcatcatgccccttatgatttgggctacacacgtgctacaatggcgtaaacaaagggaagcaagcctgcgaaggtaagcaaatcccaaaaataacgtcccagttcggactgcagtctgcaactcgactgcacgaagctggaatcgctagtaatcgcggatcagaatgccgcggtgaatacgttcccgggtcttgtacacaccgcccgtcacaccatgggagtcagtaacgcccgaagtcagtgacctaactgcaaagaaggagctgccgaaggcgggaccgatgactggggtgaagtcgtaacaaggtagccgtatcggaaggtgcggctggatcacctccttt

SEQ ID NO: 338 - DNA, 1527 bp, Artificial Sequence; identical to SEQ ID NO: 337
  STR00143.2 Blautia_obeum_ATCC_29174_16S_ribosomal_RNA

SEQ ID NO: 339 - DNA, 1527 bp, Artificial Sequence
  "STR00143.3 Blautia_obeum_ATCC_29174_16S_ribosomal_RNA "
tcagagagtttgatcctggctcaggatgaacgctggcggcgtgcttaacacatgcaagtcgaacgggaaaccttttattgaagcttcggcagatttagctggtttctagtggcggacgggtgagtaacgcgtgggtaacctgccttatacagggggataacaaccagaaatggttgctaataccgcataagcgcacaggaccgcatggtccggtgtgaaaaactccggtggtataagatggacccgcgttggattagctagttggcagggtaacggcctaccaaggcgacgatccatagccggcctgagagggtgaacggccacattgggactgagacacggcccagactcctacgggaggcagcagtggggaatattgcacaatgggggaaaccctgatgcagcgacgccgcgtgaaggaagaagtatctcggtatgtaaacttctatcagcagggaagatagtgacggtacctgactaagaagccccggctaactacgtgccagcagccgcggtaatacgtagggggcaagcgttatccggatttactgggtgtaaagggagcgtagacggactggcaagtctgatgtgaaaggcgggggctcaacccctggactgcattggaaactgttagtcttgagtgccggagaggtaagcggaattcctagtgtagcggtgaaatgcgtagatattaggaggaacaccagtggcgaaggcggcttactggacggtaactgacgttgaggctcgaaagcgtggggagcaaacaggattagataccctggtagtccacgccgtaaacgatgaatactaggtgttggggagcaaagctcttcggtgccgccgcaaacgcattaagtattccacctggggagtacgttcgcaagaatgaaactcaaaggaattgacggggacccgcacaagcggtggagcatgtggtttaattcgaagcaacgcgaagaaccttaccaagtcttgacatccctctgaccgactcttaaccgagtctttccttcgggacaggggagacaggtggtgcatggttgtcgtcagctcgtgtcgtgagatgttgggttaagtcccgcaacgagcgcaacccctatccccagtagccagcggttcggccgggcactctgaggagactgccagggataacctggaggaaggcggggatgacgtcaaatcatcatgccccttatgatttgggctacacacgtgctacaatggcgtaaacaaagggaagcaagcctgcgaaggtaagcaaatcccaaaaataacgtcccagttcggactgcagtctgcaactcgactgcacgaagctggaatcgctagtaatcgcggatcagaatgccgcggtgaatacgttcccgggtcttgtacacaccgcccgtcacaccatgggagtcagtaacgcccgaagtcagtgacctaactgcaaagaaggagctgccgaaggcgggaccgatgactggggtgaagtcgtaacaaggtagccgtatcggaaggtgcggctggatcacctccttt

SEQ ID NO: 340 - DNA, 1527 bp, Artificial Sequence; identical to SEQ ID NO: 339
  "STR00143.4 Blautia_obeum_ATCC_29174_16S_ribosomal_RNA "

SEQ ID NO: 341 - DNA, 1527 bp, Artificial Sequence
  STR00143.5 Blautia_obeum_ATCC_29174_16S_ribosomal_RNA
tcagagagtttgatcctggctcaggatgaacgctggcggcgtgcttaacacatgcaagtcgaacgggaaaccttttattgaagcttcggcagatttagctggtttctagtggcggacgggtgagtaacgcgtgggtaacctgccttatacagggggataacaaccagaaatggttgctaataccgcataagcgcacaggaccgcatggtccggtgtgaaaaactccggtggtataagatggacccgcgttggattagctagttggcagggtaacggcctaccaaggcgacgatccatagccggcctgagagggtgaacggccacattgggactgagacacggcccagactcctacgggaggcagcagtggggaatattgcacaatgggggaaaccctgatgcagcgacgccgcgtgaaggaagaagtatctcggtatgtaaacttctatcagcagggaagatagtgacggtacctgactaagaagccccggctaactacgtgccagcagccgcggtaatacgtagggggcaagcgttatccggatttactgggtgtaaagggagcgtagacggactggcaagtctgatgtgaaaggcgggggctcaacccctggactgcattggaaactgttagtcttgagtgccggagaggtaagcggaattcctagtgtagcggtgaaatgcgtagatattaggaggaacaccagtggcgaaggcggcttactggacggtaactgacgttgaggctcgaaagcgtggggagcaaacaggattagataccctggtagtccacgccgtaaacgatgaatactaggtgttggggagcaaagctcttcggtgccgccgcaaacgcattaagtattccacctggggagtacgttcgcaagaatgaaactcaaaggaattgacggggacccgcacaagcggtggagcatgtggtttaattcgaagcaacgcgaagaaccttaccaagtcttgacatccctctgaccgttccttaaccggaactttccttcgggacaggggagacaggtggtgcatggttgtcgtcagctcgtgtcgtgagatgttgggttaagtcccgcaacgagcgcaacccctatccccagtagccagcggttcggccgggcactctgaggagactgccagggataacctggaggaaggcggggatgacgtcaaatcatcatgccccttatgatttgggctacacacgtgctacaatggcgtaaacaaagggaagcaagcctgcgaaggtaagcaaatcccaaaaataacgtcccagttcggactgcagtctgcaactcgactgcacgaagctggaatcgctagtaatcgcggatcagaatgccgcggtgaatacgttcccgggtcttgtacacaccgcccgtcacaccatgggagtcagtaacgcccgaagtcagtgacctaactgcaaagaaggagctgccgaaggcgggaccgatgactggggtgaagtcgtaacaaggtagccgtatcggaaggtgcggctggatcacctccttt

SEQ ID NO: 342 - DNA, 1504 bp, Artificial Sequence
  STR00144 Escherichia fergusonii ATCC 35469 16S ribosomal RNA
agagtttgatcatggctcagattgaacgctggcggcaggcctaacacatgcaagtcgaaggtaacaggaagcagcttgcttctttgctgacgagtggcggacgggtgagtaatgtctggaaactgcctgatggagggggataactactggaaacggtagctaataccgcataacgtccaagaccaaagagggggaccttcgggcctcttgccatcggatgtgcccagatgggattactagtaggtggggtaacggctcacctaggcgacgatccctagctggtctgagaggatgacagccacactggaactgagacacggtccagactcctacgggaggcagcagtggggaatatgcacaatgggcgcaagcctgatgcagccatgccgcgtgtatgaagaaggccttcgggtgtaaagtactttcagcggggaggaagggagtaaagttaatacctttgctcattgacgttcccgcagaagaagcaccggctaactccgtgccagcagccgcggtaatacggagggtgcagcgttaatcggaattactgggcgtaaagcgcacgcaggcggtttgttaagtcagatgtgaatccccgggctcaacctgggaactgcatctgatactggcaagcttgagtctcgtagagggggtagaattccaggtgtagcggtgaaatgcgtagagatctggaggaataccggtggcaaggcggccccctggacgaagactgacgctcaggtgcgaaagcgtggggagcaaacaggttagataccctggtagtccacgccgtaaacgatgtcgacttggaggttgtgcccttgagcgtggcttccggagctaacgcgttaagtcgaccgcctggggagtacggccgcaaggttaaactcaaatgaattgacgggggcccgcacaagcggtggagcatgtggtttaattcgatgaacgcgaagaaccttacctggtcttgacatccacggaagttttcagagatgggtttgtgcttcgggaactgtgagacaggtgctgcatggctgtcgtcagctcgtgttgtgaaatgttggttaagtcccgcaacgagcgcaacccttatcctttgttgccagcggtccggccgggaatcaaaggagactgccagtgataaactggaggaaggtggggatgacgtcaagtcatcatgcccttacgaccagggctacacacgtgctacaatggcgcatacaaagagaagcgacctcggagagcaagcggacctcataaagtgcgtcgtagtccggattggagtctgcaactcgactcatgaagtcggaatcgctagtaatcgtggatcagaatgccacggtgaatacgttcccggccttgtacacaccgcccgtcacaccatgggagtgggttgcaaaagaagtaggtagcttaccttcgggagggcgcttaccactttgtgattcatgactggggtgaagtcgtaacaaggtaccgtaggggaacctgcggttggatcacc

SEQ ID NO: 343 - DNA, 808 bp, Artificial Sequence
  STR00145 Bifidobacterium dentium strain B764 16S ribosomal RNA
atggcgaaggcaggtctctgggccgtcactgacgctgaggagcgaaagcgtggggagcgacaggattagataccctggtagtccacgccgtaaacggtggatgctggatgtggggcccttccacgggttccgtgtcggagctaacgcgttaagcatcccgcctggggagtacggccgaaggctaaaactcaaagaaattgacgggggcccgcacaagcggcggagcatgcggattattcgatgcaacgcgaagaaccttacctgggcttgacatgttcccgacggccgtagagattggcctcccttcggggcgggttcacaggtggtgcatggtcgtcgtcagctcgtgtcgtggatgttgggttaagtcccgcaacgagcgcaaccctcgccctgtgttgccagcacgtcatgtgggaactcacgggggaccgccggggtcaactcggaggaaggtggggatgacgtcagacatcatgccccttacgtccagggcttcacgcatgctacaatggccggtacagcgggatggacatggcgacatggagcggatccctgaaaaccggtctcagttcggattggagtctgcacccgactccatgaaggcggagtcgctagtaatcgcggatcagcaacgccgcggtgaatggttcccgggccttgtacacaccgcccgtcaagtcatgaaagtgggcagcacccgaagccgtggcctaaccccttgtgggatggagccgtctaaggtgaggctcgtgattgggactaagcgtaacaaggtagccgtaccggaaggtgcggctggatcacc

SEQ ID NO: 344 - DNA, 796 bp, Artificial Sequence
  STR00146 Streptococcus parasanguinis ATCC 15912 16S ribosomal RNA
aaagcggctctctggtctgtaactgacgctgaggctcgaaagcgtggggagcaaacaggttagataccctggtagtccacgccgtaaacgatgagtgctaggtgttgggtcctttccggactcagtgccgcagctaacgcattaagcactccgcctggggagtacgaccgcaaggttaaactcaaaggaattgacgggggcccgcacaagcggtggagcatgtggtttaattcgaacaacgcgaagaaccttaccaggtcttgacatccctctgaccgctctagagatagagtttccttcgggacagaggtgacaggtggtgcatggttgtcgtcagctcgtgtcgtgagatgtgggttaagtcccgcaacgagcgcaacccctattgttagttgccatcattgagttgggcatctagcgagactgccggtaataaaccggaggaaggtggggatgacgtcaaatcatcatgcccttatgacctgggctacacacgtgctacaatggctggtacaacgagtcgcgagtcgggacggcaagctaatctcttaaagccagtctcagttcggattgtaggctgcaactcgcctcatgaagtcggaatcgctagtaatcgcggatcagcacgccgcggtgaatacgttcccggccttgtacacaccgcccgtcacaccacgagagtttgtaacacccgaagtcggtgaggtaccatttggagccagccgcctaaggtgggatagatgattggggtgaagtcgtaacaaggtgccgtatcggaaggtgcggctggatcacc

SEQ ID NO: 345 - DNA, 1496 bp, Artificial Sequence
  STR00147 [Clostridium] spiroforme DSM 1552 16S ribosomal RNA
atggagagtttgatcctggctcaggatgaacgctggcggcgtgcctaatacatgcaagtgaacgcttcacttcggtgaagagtggcgaacgggtgagtaatacataagtaacctggcactacagggggataactgatggaaacgtcagctaagaccgcataggtgtagagatcgcataactctatatgaaaagtgctacgggactggtagatgatggacttatggcgcattagctgttggtagggtaacggcctaccaaggcgacgatgcgtagccgacctgagagggtgaccggcacactgggactgagacacggcccagactcctacgggaggcagcagtagggaattttcgcaatgggggaaaccctgaccgagcaacgccgcgtgaaggaagaagtaattcgttatgtaacttctgtcatagaggaagaacggtggatatagggaatgatatccaagtgacggtactcataagaaagccacggctaactacgtgccagcagccgcggtaatacgtaggtggcgagcgtatccggaattattgggcgtaaagagggagcaggcggcactaagggtctgtggtgaaagtcgaagcttaacttcggtaagccatggaaaccgtagagctagagtgtgtgagaggatcgggaattccatgtgtagcggtgaaatgcgtagatatatggaggaacaccagtggcgaagggacgatctggcgcataactgacgctcagtcccgaaagcgtggggagcaaataggattagtaccctagtagtccacgccgtaaacgatgagtactaagtgttgggagtcaaatctcagtctgcagttaacgcaataagtactccgcctgagtagtacgttcgcaagaatgaaactcaaggaattgacgggggcccgcacaagcggtggagcatgtggtttaattcgaagcaacgcgagaaccttaccaggtcttgacatcgatctaaaggctccagagatggagagatagctataggaagacaggtggtgcatggttgtcgtcagctcgtgtcgtgagatgttgggttaagtccccaacgagcgcaacccctgttgccagttgccagcattaagttggggactctggcgagactccggtgacaagccggaggaaggcggggatgacgtcaaatcatcatgccccttatgacctggctacacacgtgctacaatggacagagcagagggaagcgaagccgcgaggtggagcgaacccataaaactgttctcagttcggactgcagtctgcaactcgactgcacgaagatggatcgctagtaatcgcgaatcagcatgtcgcggtgaatacgttctcgggccttgtacacacgcccgtcacaccatgagagtcggtaacacccgaagccggtggcctaaccgcaaggaagggctgtctaaggtgggactgatgattggggtgaagtcgtaacaaggtatccctacgggaagtggggatggatcacctcctt

SEQ ID NO: 346 - DNA, 1502 bp, Artificial Sequence
  STR00148 Roseburia hominis A2-183 16S ribosomal RNA
atgagagtttgatcctggctcaggatgaacgctggcggcgtgcttaacacatgcaagtcaacgaagcactttaattgatttcttcggaatgaagtttttgtgactgagtggcggacggtgagtaacgcgtgggtaacctgcctcatacagggggataacagttggaaacgactgctataccgcataagcgcacaggattgcatgatccagtgtgaaaaactccggtggtatgagatgacccgcgtctgattagccagttggcggggtaacggcccaccaaagcgacgatcagtagcgacctgagagggtgaccggccacattgggactgagacacggcccaaactcctacgggagcagcagtggggaatattgcacaatgggggaaaccctgatgcagcgacgccgcgtgagcaagaagtatttcggtatgtaaagctctatcagcagggaagaagaatgacggtacctgacaagaagcaccggctaaatacgtgccagcagccgcggtaatacgtatggtgcaagcgttaccggatttactgggtgtaaagggagcgcaggcggtacggcaagtctgatgtgaaatcccgggctcaaccccggtactgcattggaaactgtcggactagagtgtcggaggggtaagtgaattcctagtgtagcggtgaaatgcgtagatattaggaggaacaccagtggcgaaggcgcttactggacgattactgacgctgaggctcgaaagcgtggggagcaaacaggattagatccctggtagtccacgccgtaaacgatgaatactaggtgtcggggagcattgctcttcgggccgcagcaaacgcaataagtattccacctggggagtacgttcgcaagaatgaaactcaaggaattgacggggacccgcacaagcggtggagcatgtggtttaattcgaagcaacgcgagaaccttaccaagtcttgacatcccactgacaaagtatgtaatgtactttctcttcgggcagtggtgacaggtggtgcatggttgtcgtcagctcgtgtcgtgagatgttgggttaatcccgcaacgagcgcaacccctattcttagtagccagcggttcggccgggcactctaggagactgccagggataacctggaggaaggtggggatgacgtcaaatcatcatgccccttagacttgggctacacacgtgctacaatggcgtaaacaaagggaagcaatcccgcgaggggagcaaatctcaaaaataacgtctcagttcggactgtagtctgcaactcgactacacgaactggaatcgctagtaatcgcgaatcagaatgtcgcggtgaatacgttcccgggtcttgtcacaccgcccgtcacaccatgggagttggtaatgcccgaagtcagtgacccaaccgcaagagggagctgccgaaggcaggactgataactggggtgaagtcgtaacaaggtagccgtacggaaggtgcggctggatcacctcctt

SEQ ID NO: 347 - DNA, 1507 bp, Artificial Sequence
  STR00149 Holdemania filiformis strain J1-31B-1 16S ribosomal RNA
atggagagtttgatcctggctcaggatgaacgctggcggcgtgcctaatacatgcaagtgaacgcttgcttgaggacttgtcttcaagcgggagtggcgaacgggtgagtaatacatagcaatctgcccatcggcctgggataacagttggaaacgactgctaataccggataggtgtagggaggcatctctcgatcattaaagttgggatacaacacggatggatgagcttatgggtattagctagtaggtgaggtaacggctcacctaggcgatgatacgtagccgacctgaggggtgaccggccacattgggactgagacacggcccaaactcctacgggaggcagcagtaggaattttcggcaatgggcgaaagcctgaccgagcaacgccgcgtgagtgaagaaggcctcgggttgtaaagctctgttgtgaaggaagaacggctcatacagggaatggtatgggaggacggtactttaccagaaagccacggctaactacgtgccagcagccgcggtaatacgtagtggcgagcgttatccggaattattgggcgtaaagggtgcgcaggcggttttttaagttaaggtgaaagcgtggggcttaaccccatatagccttagaaactgagagactagagtacagagagggcaatggaattccatgtgtagcggtaaaatgcgtagatatatggaggaacaccgtggcgaaggcggttgcctggcctgtaactgacgctcatgcacgaaagcgtggggagcaataggattagataccctagtagtccacgccgtaaacgatgagaactaagtgttggggaactcagtgctgcagttaacgcaataagttctccgcctggggagtatgcacgcaagtgtgaactcaaaggaattgacgggggcccgcacaagcggtggagtatgtggtttaattcgacgcacgcgaagaaccttaccaggtcttgacatcccctgcaaagacatagagatatgttggagttatcagggagacaggtggtgcatggttgtcgtcagctcgtgtcgtgagatgttgggttagtcccgcaacgagcgcaacccttgtctttagttactaacattgagttgaggactctaggagactgccggtgacaaaccggaggaaggtggggatgacgtcaaatcatcatgcccctttgacctgggctacacacgtactacaatggcggatacaacgagaagcaagacagtgatgtgagcaaaactcagaaagtccgtctcagttcggattgaagtctgcaacccgacttcatgagccggaatcgctagtaatcgcggatcagcatgccgcggtgaatacgttctcgggccttgacacaccgcccgtcaaaccatgagagttggcaatacccgaagccggtggcctaacctcgaagaggagggagccgtcgaaggtagggctgatgattggggttaagtcgtaacaaggtatcctacgggaacgtggggatggatcacctcctt

SEQ ID NO: 348 - DNA, 1501 bp, Artificial Sequence
  STR00150 [Clostridium] symbiosum strain ATCC 14940 16S ribosomal RNA
atgagagtttgatcctggctcaggatgaacgctggcggcgtgcctaacacatgcaagtcaacgaagcgatttaacggaagttttcggatggaagttgaattgactgagtggcggacggtgagtaacgcgtgggtaacctgccttgtactgggggacaacagttagaaatgactgctataccgcataagcgcacagtatcgcatgatacagtgtgaaaaactccggtggtacaagatgacccgcgtctgattagctagttggtaaggtaacggcttaccaaggcgacgatcagtagcgacctgagagggtgaccggccacattgggactgagacacggcccaaactcctacgggagcagcagtggggaatattgcacaatgggcgaaagcctgatgcagcgacgccgcgtgagtaagaagtatttcggtatgtaaagctctatcagcagggaagaaaatgacggtacctgactagaagccccggctaactacgtgccagcagccgcggtaatacgtagggggcaagcgttatcggatttactgggtgtaaagggagcgtagacggtaaagcaagtctgaagtgaaagcccgggctcaactgcgggactgctttggaaactgtttaactggagtgtcggagaggtaagtggattcctagtgtagcggtgaaatgcgtagatattaggaggaacaccagtggcgaaggcgattactggacgataactgacgttgaggctcgaaagcgtggggagcaaacaggattagatacctggtagtccacgccgtaaacgatgaatactaggtgttggggagcaaagctcttcggtccgtcgcaaacgcagtaagtattccacctggggagtacgttcgcaagaatgaaactcaaggaattgacggggacccgcacaagcggtggagcatgtggtttaattcgaagcaacgcgagaaccttaccaggtcttgacatcgatccgacgggggagtaacgtccccttcccttcgggcggagaagacaggtggtgcatggttgtcgtcagctcgtgtcgtgagatgttgggttaagcccgcaacgagcgcaacccttattctaagtagccagcggttcggccgggaactcttggggactgccagggataacctggaggaaggtggggatgacgtcaaatcatcatgccccttatatctgggctacacacgtgctacaatggcgtaaacaaagagaagcaagaccgcgaggtgggcaaatctcaaaaataacgtctcagttcggactgcaggctgcaactcgcctgcacgaagtggaatcgctagtaatcgcgaatcagaatgtcgcggtgaatacgttcccgggtcttgtaacaccgcccgtcacaccatgggagtcagtaacgcccgaagtcagtgacccaaccgcaagagggagctgccgaaggcgggaccgataactggggtgaagtcgtaacaaggtagccgtatggaaggtgcggctggatcacctcctt

SEQ ID NO: 349 - DNA, 1503 bp, Artificial Sequence
  STR00151 Oscillibacter valericigenes strain Sjm18-20 16S ribosomal RNA
tatagagagtttgatcctggctcaggacgaacgctggcggcgtgcttaacacatgcaagcgaacggagcacccttgactgaggtttcggccaaatgataggaatgcttagtggcggacggtgagtaacgcgtgaggaacctaccttccagagggggacaacagttggaaacgactgcaataccgcatgacgcatgaccggggcatcccgggcatgtcaaagattttatcgctggaaatggcctcgcgtctgattagctagatggtggggtaacagcccaccatggcgacgatcagagccggactgagaggttgaccggccacattgggactgagatacggcccagactcctacggaggcagcagtggggaatattgggcaatggacgcaagtctgacccagcaacgccgcgtgaggaagaaggctttcgggttgtaaacttcttttgtcagggaagagtagaagacggtaccgacgaataagccacggctaactacgtgccagcagccgcggtaatacgtaggtggcaagcttgtccggatttactgggtgtaaagggcgtgcagccgggccggcaagtcagatgtgaaactggaggcttaacctccaaactgcatttgaaactgtaggtcttgagtaccggagaggtttcggaattccttgtgtagcggtgaaatgcgtagatataaggaagaacaccagtggcgaagcggataactggacggcaactgacggtgaggcgcgaaagcgtggggagcaaacaggattgataccctggtagtccacgctgtaaacgatggatactaggtgtgcggggactgacccccgcgtgccgcagttaacacaataagtatcccacctggggagtacgatcgcaaggttgaaatcaaaggaattgacgggggcccgcacaagcggtggattatgtggtttaattcgaagcaagcgaagaaccttaccagggcttgacatcctactaacgaagtagagatacatcaggtgccttcggggaaagtagagacaggtggtgcatggttgtcgtcagctcgtgtcgtgagatgttggttaagtcccgcaacgagcgcaacccctattgttagttgctacgcaagagcactctaggagactgccgttgacaaaacggaggaaggtggggacgacgtcaaatcatcatgcccctttgtcctgggctacacacgtaatacaatggcggtcaacagagggaggcaaagccgcgaggagagcaaacccccaaaagccgtcccagttcggatcgcaggctgcaacccgcctgcgtgagtcggaatcgctagtaatcgcggatcagcatgccgcggtgaatacgttcccgggccttgacacaccgcccgtcacaccatgagagtcgggaacacccgaagtccgtagcctaaccgcaggagggcgcggccgaaggtgggttcgataattggggtgaagtcgtaacaaggtagccgttcggaaggtgcggctggatcacctcctt

SEQ ID NO: 350 - DNA, 1489 bp, Artificial Sequence
  STR00152 Emergencia timonensis strain SN18 16S ribosomal RNA
aattaagagtttgatcctggctcaggatgaacgctggcggcgtgcctaacacatgcaagcgagcgagaagccattgactgaaacttcggtagaaggatatggtggaaagcggcggacggtgagtaacgcgtaggcaacctgccccttacagagggatagccattggaaacgatgattaaacctcataacgcatcccccccacatggaggggaagccaaagattcatcggtaagggagggcctgcgtctgattagcttgttggcggggtaacggcccaccaaggcgacgatcagtaccgacctgagagggtgatcggccacattggaactgagacacggtccaaactcctacgggggcagcagtggggaatattgcacaatgggcgaaagcctgatgcagcaacgccgcgtgaggatgaaggccttcgggtcgtaaacctctgtccttggggaagaaacaaatgacggtaccctggaggaagccccggctaactacgtgccagcagccgcggtaatacgtagggggcgagcgtatccggaattattgggcgtaaagagtgcgtaggtggttacctaagcgcagggtctaagcaatggctcaaccattgttcgccctgcgaactgggctacttgagtgcaggagaggaaagggaattcctagtgtagcggtgaaatgcgtagatattaggaggaacaccagtggcgaaggggctttctggactgttactgacactgaggcacgaaagcgtggggagcaaacaggattagtaccctggtagtccacgccgtaaacgatgagcactaggtgtcggggccgcaaggcttcgtgccgcagttaacgcattaagtgctccgcctggggagtacgcacgcaagtgtgaaactcaaggaattgacggggacccgcacaagcagcggagcatgtggtttaattcgaagcaacgcaagaaccttaccaggacttgacatcccactgacagatccctaaccggatccttcttcggcagtggagacaggtggtgcatggttgtcgtcagctcgtgtcgtgagatgttgggttaagcccgcaacgagcgcaacccttgccattagttgccatcattcagttgggcactctaatggactgccggggacaactcggaggaaggtggggatgacgtcaaatcatcatgccccttatgtctgggctacacacgtgctacaatggccggtacagcaagaagcaaaaccgcgaggtggacaaatctcaaaaaccggtcccagttcggactgcaggctgaaacccgcctgcacgaagccgagttgctagtaatcgtggatcagaatgccacggtgaatgcgttcccgggtcttgtacaaccgcccgtcacaccatggaagttgggggtgcccgaagccggcagggaaatatgctgtcaaggcaaaaccaatgactggggtgaagtcgtaacaaggtagccgtatcggaaggtgcggtggatcacctcctt

SEQ ID NO: 351 - DNA, 1522 bp, Artificial Sequence
  STR00153 [Clostridium] leptum strain DSM 753 16S ribosomal RNA
tttagagagtttgatcctggctcaggacgaacgctggcggcgtgcctaacacatgcaagcgaacggagttaaattcgacacccgagtatccggccgggaggcggggtgctgggggttgatttaacttagtggcggacgggtgagtaacgcgtgagtaacctgcctttcagagggggaaacgttctgaaaagaacgctaataccgcataacatcaatttatcgcatgataggttgataaaggagcaatccgctggaagatggactcgcgtccgattagctagttggcggggtaacgcccaccaaagcgacgatcggtagccggactgagaggttgaacggccacattgggactgaacacggcccagactcctacgggaggcagcagtgggggatattgcacaatgggggaaacctgatgcagcaacgccgcgtgagggaagaaggttttcggattgtaaacctctgttcttaggacgataatgacggtagctaaggagaaagctccggctaactacgtgccagcagccgcggaatacgtagggagcgagcgttgtccggatttactgggtgtaaagggtgcgtaggcggcgggcaagtcaggcgtgaaatctatgggcttaacccataaactgcgcttgaaactgtcttgttgagtgaagtagaggtaggcggaattcccggtgtagcggtgaaatgcgtagagatcggaggaacaccagtggcgaaggcggcctactgggctttaactgacgctgaagcacgaaagctgggtagcaaacaggattagataccctggtagtccatgccgtaaacgatgattactagggtggggggtctgaccccctccgtgccgcagttaacacaataagtaatccacctggggagacggccgcaaggttgaaactcaaaggaattgacgggggcccgcacaagcagtggagtattggtttaattcgaagcaacgcgaagaaccttaccaggtcttgacatccgtctaacgaagagagatgcattaggtgcccttcggggaaaggcgagacaggtggtgcatggttgtcgtcactcgtgtcgtgagatgttgggttaagtcccgcaacgagcgcaacccttgtttctagttgtacgcaagagcactctagagagactgccgttgacaaaacggaggaaggtggggacgacgcaaatcatcatgccccttatgacctgggccacacacgtactacaatggctgtaaacagaggaagcaaagccgcgaggcggagcaaaaccctaaaagcagtcccagttcggatcgcaggtgcaacccgcctgcgtgaagtcggaattgctagtaatcgcggatcagcatgccgcggtgatacgttcccgggccttgtacacaccgcccgtcacaccatgggagccggtaatacccgagccagtagttcaaccgcaaggagagcgctgtcgaaggtaggattggcgactggggtgaatcgtaacaaggtagccgtatcggaaggtgcggctggatcacctcctt

SEQ ID NO: 352 - DNA, 1503 bp, Artificial Sequence
  STR00154 Flavonifractor plautii strain 265 16S ribosomal RNA
tattgagagtttgatcctggctcaggatgaacgctggcggcgtgcttaacacatgcaagcgaacggagtgctcatgacagaggattcgtccaatggagtgagttacttagtggcggacggtgagtaacgcgtgagtaacctgccttggagtggggaataacaggtggaaacatctgcaataccgcatgatgcagttgagtcgcatggctctgactgccaaagatttatcgctctgaatggactcgcgtctgattagctagttggcggggtaacggcccaccaaggcgacgatcagagccggactgagaggttggccggccacattgggactgagacacggcccagactcctacggaggcagcagtggggaatattgggcaatgggcgcaagcctgacccagcaacgccgcgtgaggaagaaggctttcgggttgtaaacttcttttctcagggacgaagcaagtgacggtactgaggaataagccacggctaactacgtgccagcagccgcggtaatacgtaggtggcaaggttatccggatttactgggtgtaaagggcgtgtaggcgggactgcaagtcagatgtgaaaccacgggctcaacctgtggcctgcatttgaaactgtagttcttgagtactggagaggcgacggaattcctagtgtagcggtgaaatgcgtagatattaggaggaacaccagtggcgaggcggtctgctggacagcaactgacgctgaggcgcgaaagcgtggggagcaaacaggatagataccctggtagtccacgctgtaaacgatggatactaggtgtggggggtctgacccctccgtgccgcagttaacacaataagtatcccacctggggagtacgatcgcaaggttgaactcaaaggaattgacgggggcccgcacaagcggtggagtatgtggtttaattcgaagcacgcgaagaaccttaccagggcttgacatcccgctgaccggtgtagagatacacctttccttcggggacagcggtgacaggtggtgcatggttgtcgtcagctcgtgtcgtgagatgttggttaagtcccgcaacgagcgcaacccctattgttagttgctacgcaagagcactctaggagactgccgttgacaaaacggaggaaggtggggacgacgtcaaatcatcatgcccctttgtcctgggccacacacgtactacaatggtggtcaacagagggaagcaatcccgcgaggggagcaaacccctaaaagccatcccagttcggattgcaggctgcaactcgcctgtatgagttggaatcgctagtaatcgcggatcagcatgccgcggtgaatacgttcccgggccttgacacaccgcccgtcacaccatgagagtcgggaacacccgaagtccgtagcctaaccgcaggggggcgcggccgaaggtgggttcgataattggggtgaagtcgtaacaaggtagccgttcggaaggtgcggctggatcacctcctt
